United States Patent Application Publication US 2006/0216722 A1 - sequence listing, part 2

SEQ ID NO: 1517 - DNA, 2375 bp, Homo sapiens
gtggcggcgagcggcgtcagagcttgagggggggttgacggcttctggcgggtggcggtgttgaaggcgagagcttgcttggcccgtgtcgcttctgtcccaagaaccggacggagagtgagggcacgagggtcgctgtcgggggctgtcgtcttccacgtacacgtcgtcgtgaggagcgcagtccggactcttcccgcaacccctccggctccctttccgcacgcctcgaggcggcggcggccaccgagacagcagcgcaccttcccccatcccttccccttatcccccagcccaaaagggcccggtctgcgccccacccccgcccgtccgcccgctacgccgccgccatgtcggcgcaggcccagatgcgcgcgatgctggaccagttgatgggcacctcccgggacggttcaatgtatctatgcctgcctacctcaatctgcaagggagtgtcagaaaggccccgcattcgccaagccgagatacaactcgtcaacgaatcaaattcagtgatgacagagtatgcaagagtcaccttctcaactgttgtcctcatgatgtcctttctggaactagaatggatcttggagaatgtctgaaagtccatgacctggctttaagagcggattatgaaattgcatccaaagaacaagattttttctttgaacttgatgccatggatcatctgcagtcattcattgcagattgtgatcgtagaacagaagtggccaagaaaagattagcagaaactcaagaagagattagtgctgaagtagcagcaaaggcagaacgtgttcatgagttaaatgaagaaattggtaaattgttagccaaggtggaacaactaggagctgaagggaatgtggaggaatcccagaaagtaatggatgaagtagagaaagcacgggcaaagaaaagagaagcagaggaagtttatcggaattctatgccagcttccagttttcagcagcagaaacttcgagtctgtgaagtctgctctgcctatttaggacttcatgataatgacagacgactggctgatcattttgggggtaaactgcacctgggatttattgaaataagagagaagcttgaagaattaaagagagtcgtagctgagaagcaggagaaaagaaaccaggaacggctgaaacgaagagaagagagagagagagaagaaagggagaagctgaggaggtcccgatcacacagcaagaatccaaaaagatccaggtccagagagcatcgcagacatcgatctcgctccatgtcacgtgaacgcaagaggagaactcgatccaaatctcgggagaaacgccatcgccacaggtcccgctccagcagccgtagccgcagccgtagccaccagagaagtcggcacagttctagagataggagcagagaacgatccaagaggagatcctcaaaagaaagattcagagaccaagacttagcatcatgtgacagagacaggagttcaagagacagatcacctcgtgacagagatcggaaagataagaagcggtcctatgagagtgctaatggcagatcagaagacaggaggagctctgaagagcgcgaagcaggggagatctaactagctgtgtacatttcttcagtccttaagcttcctacggagttacgtactattgtttagttcacagctgttcagggtgacagtgagcagatccagacaccagatccagctaggctagatgtacagtatctaacttgatctgaactgaacctgttttccttgatgatgcctaaaactacatccatagtttctggtgaacctgtaatacagttctgaaagtacagttttatataataagatgctgatctctttattctttcaagtaagagtgctagtgaacaaattgtgttacttgccttgggattttttgaacgtttgtaaaatgctgtcttcctagtccaaacagctgcagctttgggcatttttctttttaattattcttcctctgactttgtatcccttaatacctacactctccaattgtaagagaaagggggcagggaagcaatatagcttccattctaaggctgtattcccgttatgaattactagctgattacagttcagagcattgatcctggaatgtgtgctggagaaatttaaaatactggggttttttgtttaatggtgcctatttagagttggaagttgaacagctgttgcattacatacttttgcttttttattgaaattttgaaatcaaacgtcttgatttttctgttctgttgaattgctatgttcaggatgttctagggggtgggggcagggactcttttcgtaataagcacttgttttattttgtgtgtgtggagtataaaggctacacccttattgt

SEQ ID NO: 1518 - protein, 391 aa, Homo sapiens
MPAYLNLQGSVRKAPHSPSRDTTRQRIKFSDDRVCKSHLLNCCPHDVLSGTRMDLGECLKVHDLALRADYEIASKEQDFFFELDAMDHLQSFIADCDRRTEVAKKRLAETQEEISAEVAAKAERVHELNEEIGKLLAKVEQLGAEGNVEESQKVMDEVEKARAKKREAEEVYRNSMPASSFQQQKLRVCEVCSAYLGLHDNDRRLADHFGGKLHLGFIEIREKLEELKRVVAEKQEKRNQERLKRREEREREEREKLRRSRSHSKNPKRSRSREHRRHRSRSMSRERKRRTRSKSREKRHRHRSRSSSRSRSRSHQRSRHSSRDRSRERSKRRSSKERFRDQDLASCDRDRSSRDRSPRDRDRKDKKRSYESANGRSEDRRSSEEREAGEI

SEQ ID NO: 1519 - DNA, 1511 bp, Homo sapiens
tgaactgaggcgaactccgccgccaagtgagtgaggaggaggaggaggagaaggaggaggaggaagaggaggagcgcagtcggagcgcggcggcagcggcagaggcgccgcggcggggaccagcccagagagaccccccgagcccgcggcacaggcggcggcggcgctgagcgggctcgaccagccgagcgagcggcggccccggctcctcctcgtccggcgccagcagcccgcgccccgcgcccgcactcggccagccgagacccgcctcccgcccgcccgccggcctcgtgagggacgcgccgagccgggcggccgagagcggcggcggctgggagcgcgtcgggcccgggcggaaagtgcctgcggggggcgggcgagcgcgcggtgccggccgccccggggctcggcgcgggagccagagcgggagccggcgcggagcgggacgccgggtcccgagcggcccgcggccggggctcgcccccgcccctccctcctctccggcggcggcggcggcggcggcgggcggagtgagctgcggagcctggaatatggtcggggaaatggaaacgaaggagaagccgaagcccaccccagattacctgatgcagctgatgaacgacaagaagctcatgagcagcctgcccaacttctgcgggatcttcaaccacctcgagcggctgctggacgaagaaattagcagagtacggaaagacatgtacaatgacacattaaatggcagtacagagaaaaggagtgcagaattgcctgatgctgtgggacctattgttcagttacaagagaaactttatgtgcctgtaaaagaatacccagattttaattttgttgggagaatccttggacctagaggacttacagccaaacaacttgaagcagaaaccggatgtaaaatcatggtccgaggcaaaggctcaatgagggataaaaaaaaggaggagcaaaatagaggcaagcccaattgggagcatctaaatgaagatttacatgtactaatcactgtggaagatgctcagaacagagcagaaatcaaattgaagagagcagttgaagaagtgaagaaattattggtacctgcagcagaaggagaagacagcctgaagaagatgcagctgatggagcttgcgattctgaatggcacctacagagatgccaacattaaatcaccagcccttgccttttctcttgcagcaacagcccaggctgctccaaggatcattactgggcctgcgccggttctcccaccagctgccctgcgtactcctacgccagctggccctaccataatgcctttgatcagacaaatacagaccgctgtcatgccaaacggaactcctcacccaactgctgcaatagttcctccagggcccgaagctggtttaatctatacaccctatgagtacccctacacattggcaccagctacatcaatccttgagtatcctattgaacctagtggtgtattaggtatggctttcccaacgaaaggctaa

SEQ ID NO: 1520 - protein, 319 aa, Homo sapiens
MVGEMETKEKPKPTPDYLMQLMNDKKLMSSLPNFCGIFNHLERLLDEEISRVRKDMYNDTLNGSTEKRSAELPDAVGPIVQLQEKLYVPVKEYPDFNFVGRILGPRGLTAKQLEAETGCKIMVRGKGSMRDKKKEEQNRGKPNWEHLNEDLHVLITVEDAQNRAEIKLKRAVEEVKKLLVPAAEGEDSLKKMQLMELAILNGTYRDANIKSPALAFSLAATAQAAPRIITGPAPVLPPAALRTPTPAGPTIMPLIRQIQTAVMPNGTPHPTAAIVPPGPEAGLIYTPYEYPYTLAPATSILEYPIEPSGVLGMAFPTKG

SEQ ID NO: 1521 - DNA, 6953 bp, Homo sapiens
tgaactgaggcgaactccgccgccaagtgagtgaggaggaggaggaggagaaggaggaggaggaagaggaggagcgcagtcggagcgcggcggcagcggcagaggcgccgcggcggggaccagcccagagagaccccccgagcccgcggcacaggcggcggcggcgctgagcgggctcgaccagccgagcgagcggcggccccggctcctcctcgtccggcgccagcagcccgcgccccgcgcccgcactcggccagccgagacccgcctcccgcccgcccgccggcctcgtgagggacgcgccgagccgggcggccgagagcggcggcggctgggagcgcgtcgggcccgggcggaaagtgcctgcggggggcgggcgagcgcgcggtgccggccgccccggggctcggcgcgggagccagagcgggagccggcgcggagcgggacgccgggtcccgagcggcccgcggccggggctcgcccccgcccctccctcctctccggcggcggcggcggcggcggcgggcggagtgagctgcggagcctggaatatggtcggggaaatggaaacgaaggagaagccgaagcccaccccagattacctgatgcagctgatgaacgacaagaagctcatgagcagcctgcccaacttctgcgggatcttcaaccacctcgagcggctgctggacgaagaaattagcagagtacggaaagacatgtacaatgacacattaaatggcagtacagagaaaaggagtgcagaattgcctgatgctgtgggacctattgttcagttacaagagaaactttatgtgcctgtaaaagaatacccagattttaattttgttgggagaatccttggacctagaggacttacagccaaacaacttgaagcagaaaccggatgtaaaatcatggtccgaggcaaaggctcaatgagggataaaaaaaaggaggagcaaaatagaggcaagcccaattgggagcatctaaatgaagatttacatgtactaatcactgtggaagatgctcagaacagagcagaaatcaaattgaagagagcagttgaagaagtgaagaaattattggtacctgcagcagaaggagaagacagcctgaagaagatgcagctgatggagcttgcgattctgaatggcacctacagagatgccaacattaaatcaccagcccttgccttttctcttgcagcaacagcccaggctgctccaaggatcattactgggcctgcgccggttctcccaccagctgccctgcgtactcctacgccagctggccctaccataatgcctttgatcagacaaatacagaccgctgtcatgccaaacggaactcctcacccaactgctgcaatagttcctccagggcccgaagctggtttaatctatacaccctatgagtacccctacacattggcaccagctacatcaatccttgagtatcctattgaacctagtggtgtattagagtggattgaaatgccagtcatgcctgatatttcagcccattgacttgctggatgaaggactagaatacagcagctgttataacacgaccagtcaatgtggaacaaactgtttctgtgcaacccctttgttttaccagacaaaatttgaatactttttttcctgaattgtatatgaccttggtgctgcatgcatgctgttgacttttaggactttgatcttttaaggttttttttccccagcattaatattgatttataaagatttgaaaatctttaatgaactggagaacactaagatttaaactcgaaaattcgttgttcaagtaaagaaagccatgatgctctgtatgttatctgtgtgtgtgcatgcactcaggtgccctttgtttcatgaacaaatacatttcattgtacatgttttctgtttaaatcattgtataaagtaattgcaggtcagaattataccacagaactgtttatgagaggcttgtgtctgttgcacatttcttgaagcatttttaaaataacatgtaacctgtaaccttgttgtttaagttttcttttctattaatactctgtcctgtggtcccgtgcatgctccttttcccagaactcctctctgctgcacccacagcatctgttcccgaggagttatgactcttgacttcctgcagggctggggctcttagccaccagctgctgttccagcactttcagcgcaagatctccctgattttgccacgtggaattgtacttgtatatgattaccttatctaaaatgaataagaggtgatggaccagtttactgcttagaaatagcaagaggcactgcagtaaaacttgtttctcattgtaaagcttcatgtcttttgtttgttggaaaatttttacttatagaaacttaattattagactggtaaaataaagaccaaaatatgcagatttctaattggcattcataaggtgaataataataagtgcccaatgaaaaaatctattatggttaatttcatttcttgctttgccacctaagcagtaaaacatgatattgaccacttggagaactcagaaaattattttaaatttctaagttataataaatttgcacacagataacatgcatgctatttatgtcacatctcacattaaattattttaaaataagcagtgcccttcaaaacagatgcagacatgtgtgttggtagtagtgaggagattggtattagcatcaagtcttcattgatgactaatttttaattcccttccttttatctttaggtatggctttcccaacgaaaggctaagaattcaagaacggtcttaactgaaccctcatcagatctgaatttaacaaatgcttagtctcagcagcctccgggggaaaaaagcttagcctagcagtcagtgacttacttgcactttttgcacatagatataaagtaaaattatgttattaatttggtttagtctgtaatattacacagtaatggtaatttataaaggagtgtatagtagtatactgactgctaagtgtactatactgtttgctttactaatcacctaattcattgcagttcatacttattgactcagagtttaaaaccacaatctgtaggctttaagaattgcttttaaacctttttaagtgataaactcttgaagtggtcttaaggttagcaaataattgtctgtattaaacatggcgttatttaagtagtcctgctgcaagaaaggcacttcagtgaatatgtgactagtaaagcttaaatatgtttggatctaatagagctcatgaaatactgtaacttggggattgtaaatgaatggatacaataggttaaggcccaagatgtttgaaatgaatgcaatattaatagatgcatatatacatgacatattgtggttaattttaaaactactgtgccttaacgtgtttcttaaacttttgtagtaaatgaacatttgaaatccattttgataaacctgctgttaatgttttttccccccttgtgaatgttttctaactttgtcttggtaattgcaatttaactaggtgcggtggctactaaagttcgaaggcacgatatgcgtgtccatccttaccaaaggattgtgaccgcagaccgaggttagtttagttctgcagttcttgtctataagaaatgcgttgggtgtccataaaatttgcaacaccacacctgatggaaaaatgtaattgcttacctgcacacagttttttttccttttctaaatttgtttgtgatcattgacagatttaagggttgggttttttgttttggtttggttttttctcccttcatattttaacttattaaatcttctattattatgtactatgatttattcctactaaaacataaattagtcaatttggggagctattaaattttgatgttgcctcagttattttcattaataacttttgctaaaatttaccttttaaaagttctgaaatttggggttggtattgcaaaatgaattgaacggatggtgctttaatgagagaagtaaaggaatatatgcctcctgtgtacttttggagaaaactgaagatttagtttccatttttctttataataaaatatttgagccactgtataaacatgagggtgcacatgtcaagtacttagctaaaatcaacaaagtgaggactgtgaagataactttcatgtagttggatttttttatataaattagagcgtcaattcccttttattcttacattctcttgccaaaatggatcctttgatttttgtcatttgctgctaaaatatattatctgaaggtaaactgtctcttgaagttctgtggtggtatgagatccagctgtgtgaatataatttttgactaacctgtgactggaaaataagtcttcatttttctcctttacaacttttataatttgtgtcctgtatatgcccttggacccttttataaattatttttgcttattgaggaatggtattttcggtttattgacattgaattgttttctaagtttttccatcacaagataggaatatcaagcatggtagtaaaaaaggattttttacaagtttctattatggcacatttgtttcctacaaattaaattgatcaaagtctcaaatattagtggaggaaaaagtgctggatttgtacttcaattgtacatcttctatgaatttatgaaggacctacctgctttatgtgattaccttgagtactgatgataaatactagacacagctgttgtccacatcagaaataacatgcctttcccaaagacattgttaatatttgtttagcataatccataaagaacgttgaagacttttaaactaatgtattcatcactaacagtgattgttcagtgaacaaaatagaccccagctccgtggtcgtctatgaggatggtattccttgtaagtgttctgtatgagcacgtctcatagggatggggaagttttttggaaagtcacttgagttttaaagaaactggacaattccatgaataatttgaggttttattcatattgctaatgtctacaattgttctaaagagtattttaaagtagtttttttcccccagctaatctttccctatgtatgcccccttttaggagatttctcaccattttgctttaacacaataattattggcctacttaatactccagtgccttgagatagttggacatattttaggaagattttattgtatttggaaaattacgacacattccatgcatggatcttttgtagttacgtgttttgattagtcctgtcactgtttttatttaaaatgcagtgtcagcaaaccgaaatgctcatttcttttttagtaacagagtactcgtatacttatcactgtatgcactcattgggtctaagggagatgtctgaagtccttcacttaaattattttatgatactactgttttctctatttttgaggttaaaattattttaaaaaaatattttgaagagaagtttattagtataagcattcatttaatgcaaaaaaactcagcccttggacatataaccatgtaattctatatgaacgtttagagtactacatggttgaccaatatctagttctttactaaaagtaaactcacctctttatatatatttcaaaactgaatttgaagcctattagagaccaactgaccttttagttgtaatgaactgtatggtcttgcatggtgacacacctgtgtaggaggccaagacttggcagaggatgtagtctaggtgtcctggtatatataaatggtcactcacttcgtttatatattccacactcagaaaagaagtcagagttttttctgagtaatacaaaaaccatcacttacataatttgtataagaaactttaaacagttttaatcaaaactatgagtaacatcaaaaatgctttaagattctatattttggaatacctgtgaagtagtatgactacatcatgttaaatatttattttcttctatgattttggagcagcaatttttattttaaataaaattccacttttaagaaattcagggaagatttggtcacattgaagatacagtatttttgtagtatttataaactgttctaaatgatagactatagaaaacatttttgtcatatgaaggtaaatcagtccattattttggatcatttaaactgaacattacaccttctgggctttgatttatgaagtggcacagaatctaactttgcactgaatatcttttcattcacatctcctctgccttagtcacaatggcaacagtacagaaaattctatcaaacctcagaatatagtagaaataattaagctgttgaatgagtcttaaaaattatactactgttaagtggaccaagtttggtgaagcagaatgtgacaaaggttgattaaggaaggaacaactcaaggacattgggaatgataacttttccacttgagaactactttatgttttactgtaatttttaaagtttttttgtcctttttgttattttgcaaaagaaaatagtatttacaggtggcttcttttaaaatataaaaatataaagcaggaatgtatatgaaatgtcagattttattgtatttgcagagtattagctttgaaattgaataaagaaagctgtttgtagttttaaaatgccttattggtatcaattagaaatttcttctattttttgatgtacttagagctttttgagtgtagaattttaaatggcaggattttacagtgtttacatgcaagtgcattttataagtgttctatatgtgtaaaatagtattttcaactggaaagtgttggctagtgcaaaaggcctggccattttctggttcccatgatgttgcctacactgctagactacagtttagtatcgctttgtatcatgaggccaagaaattccatgttgtttgtaaatagaataattgaaaaagcaataaacatttattg

SEQ ID NO: 1522 - protein, 325 aa, Homo sapiens
MVGEMETKEKPKPTPDYLMQLMNDKKLMSSLPNFCGIFNHLERLLDEEISRVRKDMYNDTLNGSTEKRSAELPDAVGPIVQLQEKLYVPVKEYPDFNFVGRILGPRGLTAKQLEAETGCKIMVRGKGSMRDKKKEEQNRGKPNWEHLNEDLHVLITVEDAQNRAEIKLKRAVEEVKKLLVPAAEGEDSLKKMQLMELAILNGTYRDANIKSPALAFSLAATAQAAPRIITGPAPVLPPAALRTPTPAGPTIMPLIRQIQTAVMPNGTPHPTAAIVPPGPEAGLIYTPYEYPYTLAPATSILEYPIEPSGVLEWIEMPVMPDISAH

SEQ ID NO: 1523 - DNA, 4704 bp, Homo sapiens
tgaactgaggcgaactccgccgccaagtgagtgaggaggaggaggaggagaaggaggaggaggaagaggaggagcgcagtcggagcgcggcggcagcggcagaggcgccgcggcggggaccagcccagagagaccccccgagcccgcggcacaggcggcggcggcgctgagcgggctcgaccagccgagcgagcggcggccccggctcctcctcgtccggcgccagcagcccgcgccccgcgcccgcactcggccagccgagacccgcctcccgcccgcccgccggcctcgtgagggacgcgccgagccgggcggccgagagcggcggcggctgggagcgcgtcgggcccgggcggaaagtgcctgcggggggcgggcgagcgcgcggtgccggccgccccggggctcggcgcgggagccagagcgggagccggcgcggagcgggacgccgggtcccgagcggcccgcggccggggctcgcccccgcccctccctcctctccggcggcggcggcggcggcggcgggcggagtgagctgcggagcctggaatatggtcggggaaatggaaacgaaggagaagccgaagcccaccccagattacctgatgcagctgatgaacgacaagaagctcatgagcagcctgcccaacttctgcgggatcttcaaccacctcgagcggctgctggacgaagaaattagcagagtacggaaagacatgtacaatgacacattaaatggcagtacagagaaaaggagtgcagaattgcctgatgctgtgggacctattgttcagttacaagagaaactttatgtgcctgtaaaagaatacccagattttaattttgttgggagaatccttggacctagaggacttacagccaaacaacttgaagcagaaaccggatgtaaaatcatggtccgaggcaaaggctcaatgagggataaaaaaaaggaggagcaaaatagaggcaagcccaattgggagcatctaaatgaagatttacatgtactaatcactgtggaagatgctcagaacagagcagaaatcaaattgaagagagcagttgaagaagtgaagaaattattggtacctgcagcagaaggagaagacagcctgaagaagatgcagctgatggagcttgcgattctgaatggcacctacagagatgccaacattaaatcaccagcccttgccttttctcttgcagcaacagcccaggctgctccaaggatcattactgggcctgcgccggttctcccaccagctgccctgcgtactcctacgccagctggccctaccataatgcctttgatcagacaaatacagaccgctgtcatgccaaacggaactcctcacccaactgctgcaatagttcctccagggcccgaagctggtttaatctatacaccctatgagtacccctacacattggcaccagctacatcaatccttgagtatcctattgaacctagtggtgtattaggtgcggtggctactaaagttcgaaggcacgatatgcgtgtccatccttaccaaaggattgtgaccgcagaccgagccgccaccggcaactaacctatgaccttctgacctctgaactcttcacccaatgatgacctgaccatgcctgcctgctgatcagttaactggtaatcgcctttgcttgcctgtcgtcagtgcagcgagctgaggcacttgtccgttcgtcttaccatctaaccaaacaaaagacaaagaaattgttgtcctccaactcagctttttttttttttttttcctgtttgggtgaaagtggttctagaaactgcactgaatagtagtaaagcaataaggcccaattcatcccacagcactgatcatcttttaatatcccaccctaagcgaacggtaagaaggcctctcttaagaaggggagacagatggtccttaactactcaatgacagaggcagttactgtgagagacttctaggaatctttttcttctcatagcgaagtcaaagctctctctgaatgtactgtgtgatgatgcatcatgcatgaaccttcggtcagggatatcattggtgaagtgatttcaaaaagtattcaaaatttgatatgctgtttagtcactacagtgccctcaaagggcagaagttgcagccttttttatattgcctgccaaaatttgaagtattagaagaaagtgtgccatgagagaaaaacttaaggagttttgaaaagtaatgcaaataacaaaactgcaacactatttttaaaaagataaatatctgagttaaaattactgaatctttattttacacctaaaaaaatatgagaacaaggtacatgcattatgtgtcacattactgggcaaactgttcaagtatttttttttaaacctccctgtatagaaaaaaatcattaaggatgtaaaagccatgcttgcctatttgctgtatacatgtaatgaaattgtagataaagtgtagtgcattgaaacaaatgaacaaaaagtagatacttttactatacaagggtgctggtgcagaaaaaaatatatatatttttggaaatgtagcattttatactttcaagtgttataaaaaaaaagaaaaagaacaaagaaaccctttatttcattaaatgattttttctggtggttgtcaagaaacaaaagaccaaaagagcctttttgtctttcttttttattttttaagtattggaataagtctaaagaaaagaaagtgccttattttccttcatggtcattcagtcaagtgtctcataaagatcagctcctccctcagaatacaagttaatgcatgttactcagtcgcccagtatgtgaaagaagatatgagggagacaaatgagttgatagtttgaattataggatttttgccacgttaccttgatgcaaatttgccaaatctgatactgtgaaaagatttgataacttttctaatgcctgactagtaagttttaaaacatcattctttaaaagaatagtttaatacttttggttattccaatcttcaatgttaacccaaaggattctgagataaaaattatgtgtcatctaaacttcagtttacagacaaaattagagctttgttttatttggagaagggggatgcattcatttgattttgttttttgtttttaattaattgaatataataggatacctagcaaatgttttcacaaaagtgaatctttgtgattttcattctagaaaacaatgttttaaatcacccaaatttaatcacatgtctttatatcataccagataactggtgtagtgtatccttttactgtttcaataacctctgcctcccccaccccttaactttaaaagaatgtgaaaaactagcatcatagtgcatataaatactcaaccacatttcagcttaagcttctaatttctcaagaagttgaaacagttagttatgtagttgaagcaatttgtgtgcaaagcctacatctaaacacttgagtgaataatcattaactgctcagtaccagacgtggcaaatctcaagtgacagtggacccccccccccgcccagcttatcaactcgtcccctcttccacaccttcccagcatcacagtcagaggtcagcaggaagctgagtcattaccttcttggtgacctcccccaccatcttgtctcacttggaaaccgttgtcagtttatttactatgcaatagacattcattgttttgtatccagctagctttggtttaatatgccactgctttgtctttctgttacacatacagttttgatttatttacaatatatgctgtgccattttgatttttatattgtttggttggttgaataaatttgcgacactcaaacacttgaggtgatagttgttaaaaacaataccagtatttgatccagtttcatctcaactatgttatacctggacattttagatgtttatcaaaggtcttttatggggaagaaagtaaatgtatgaaataataaatgtgtgacatttatagggaatgttggctctgaacaaacttttgaaaacttggttgacaaaattttggatcaactgaaaaaagcatgacttttgaaatctctgaatgccttggttctcagtattatcattctttattgaatttatttcttattaaaatatgtagtttttaagactttttttctgacagtattatgtaattttttagcgtgggtagatgggagtgtcgcttgtatgttatcgtacagctgacatgtatttttgtctattctttattatcttagtttcatgctatgtatgtaccataaccaacctattgcctatgagaaacatgtaagataatgtatttacagccattgttacaagtttataatgtatttttctatcttgttttatatgtatgttatataacattcaaaaagaatttttttcttgattgagaaaaggatacaaaatgcaaaatccacaattttgataactgaaaattgccaattgttttgcagtactttattatattgggtgtcttgtcttttttgggcttttagttagctaatgaatgaatacattagacacttttgggttttagttgggattttacatagcttgcattttaattctttggttctttgctgtttctattaacccacagcattattttaataaatgttataataccaacctactaactctggactttgtctgtttattaacctttatatgttt

SEQ ID NO: 1524 - protein, 341 aa, Homo sapiens
MVGEMETKEKPKPTPDYLMQLMNDKKLMSSLPNFCGIFNHLERLLDEEISRVRKDMYNDTLNGSTEKRSAELPDAVGPIVQLQEKLYVPVKEYPDFNFVGRILGPRGLTAKQLEAETGCKIMVRGKGSMRDKKKEEQNRGKPNWEHLNEDLHVLITVEDAQNRAEIKLKRAVEEVKKLLVPAAEGEDSLKKMQLMELAILNGTYRDANIKSPALAFSLAATAQAAPRIITGPAPVLPPAALRTPTPAGPTIMPLIRQIQTAVMPNGTPHPTAAIVPPGPEAGLIYTPYEYPYTLAPATSILEYPIEPSGVLGAVATKVRRHDMRVHPYQRIVTADRAATGN

SEQ ID NO: 1525 - DNA, 4704 bp, Homo sapiens; identical to SEQ ID NO: 1523

SEQ ID NO: 1526 - protein, 347 aa, Homo sapiens
SCGAWNMVGEMETKEKPKPTPDYLMQLMNDKKLMSSLPNFCGIFNHLERLLDEEISRVRKDMYNDTLNGSTEKRSAELPDAVGPIVQLQEKLYVPVKEYPDFNFVGRILGPRGLTAKQLEAETGCKIMVRGKGSMRDKKKEEQNRGKPNWEHLNEDLHVLITVEDAQNRAEIKLKRAVEEVKKLLVPAAEGEDSLKKMQLMELAILNGTYRDANIKSPALAFSLAATAQAAPRIITGPAPVLPPAALRTPTPAGPTIMPLIRQIQTAVMPNGTPHPTAAIVPPGPEAGLIYTPYEYPYTLAPATSILEYPIEPSGVLGAVATKVRRHDMRVHPYQRIVTADRAATGN

SEQ ID NO: 1527 - DNA, 762 bp, Homo sapiens
atgcccctgctgcccagcaccgtgggcctggcaggcctgctcttctgggctggccaggcagtgaacgccttgataatgcctaatgctaccccagccccggcccagcccgagagcacggctatgcggctcctgagtggcctggaggtgcccaggtaccgccggaagcgccacatctctgtgagagacatgaatgccttactggattatcacaaccacatccgggccagtgtgtacccacctgccgccaacatggaatacatggtctgggacaagcggctggccagggctgccgaagcctgggccacccagtgcatctgggcacatgggccttcacagctgatgagatacgtgggccagaacctctccatccattctggccagtaccggtccgtagtggatctcatgaagtcctggtctgaggagaagtggcattacttgtttccggccccaagggactgtaacccacactgcccctggcgctgcgatggccccacctgctcccattatacccagatggtgtgggcatcctccaatcggctgggctgtgccatccacacctgtagtagcatcagtgtctggggcaacacctggcatcgggcggcatacctggtctgcaactatgccattaagggcaactggattggcgagtccccgtacaagatgggaaagccgtgctcctcctgtccccccagttatcaaggcagctgcaatagcaacatgtgcttcaaggggctgaaatccaacaagttcacgtggttctga

SEQ ID NO: 1528 - protein, 253 aa, Homo sapiens
MPLLPSTVGLAGLLFWAGQAVNALIMPNATPAPAQPESTAMRLLSGLEVPRYRRKRHISVRDMNALLDYHNHIRASVYPPAANMEYMVWDKRLARAAEAWATQCIWAHGPSQLMRYVGQNLSIHSGQYRSVVDLMKSWSEEKWHYLFPAPRDCNPHCPWRCDGPTCSHYTQMVWASSNRLGCAIHTCSSISVWGNTWHRAAYLVCNYAIKGNWIGESPYKMGKPCSSCPPSYQGSCNSNMCFKGLKSNKFTWF

SEQ ID NO: 1529 - DNA, 6336 bp, Homo sapiens
cgccgctcaggccctggagcggacggttcctactgcggctgggcaccggctccgctcccgcgtctgcccgcgctccagctgcgcctggcccggccccggcccggctcggcgtggccccggcctccaagcgaaggcgccgctgccgctgggccgctcccagggccatgaggaagcggcggcagccactgcggcccgcgtcaaggacttctccagacaggttatgttacctgcagaggctgccctgaagctccctgtggcctggagactatgtacaagaggaatggtctgatggctagcgtgttggtcacctctgccactccacagggcagcagcagctcggactctctggagggccagagctgcgactatgccagcaagagctatgatgccgttgtcttcgatgtcttgaaagtgaccccagaggagtttgctagccagattacattaatggatatacctgtgtttaaagctatccagccggaggaactagccagctgtggatggagtaagaaggagaaacacagtcttgcccctaacgttgtggcctttacccggaggtttaaccaggtcagtttttgggttgtacgagaaattctaacagcacagactttaaaaataagggcagaaatcctcagccattttgtgaaaatagccaagaaacttctagaactcaacaaccttcattctctcatgtctgtggtatcagcattacaaagtgctcccatcttcaggctgacaaaaacctgggctcttttaaatcgaaaagacaagactacctttgagaaattggactacctgatgtcgaaagaagataattacaagcggacacgggaatatatccgaagcctgaagatggttccaagtattccctatctaggaatctatcttctggatttaatctacattgattctgcatatcctgcctcaggcagtatcatggaaaatgaacaaagatccaatcagatgaacaatattcttcgaataattgctgatttacaagtttcctgcagctatgatcacctcaccaccctgccccatgtgcagaagtacctgaagtccgtacgctacattgaagagctccagaagtttgtggaagacgacaactacaaactgtcgctcagaatcgaaccaggaagcagctctccaagactagtctcttccaaggaagatcttgcaggtccctctgctggctccggttctgcgaggttcagccggaggcccacctgtcctgacacatctgttgctggcagcctccccacacctccagtccccagacacaggaagagccacagcctaggcaacaatatgatgtgtcagttgagtgtagttgagagtaaaagtgcgacattcccatcggagaaagcaaggcacctactggacgacagtgtcctagagtcccgcagcccccgaaggggcctggctctgacctcctcctctgctgtcaccaatggactctccctaggcagtagtgagagctcagagtttagtgaagagatgtcttcagggctggaaagccccaccggcccgtgcatctgttctctggggaactccgcagctgtgcccaccatggaggggcctctgagaagaaaaaccctgctcaaggaagggcggaagcctgcgctgtcctcgtggaccaggtactgggtcatactctcaggatccaccctcctgtactacggagccaagtccttgcggggcacagacagaaaacactataaatccacacctggcaaaaaggtttccatcgtgggctggatggtgcagctgcccgatgaccccgagcacccagatatcttccagctgaacaaccctgacaaaggcaatgtttacaagtttcagactggttcccgatttcatgcaatactgtggcacaagcatttggatgatgcatgtaaaagcaacaggcctcaggtacctgcaaaccttatgtcatttgagtaagtctctgcaggacgtggcatgacttcagaggcttctgggaacccaggctgggcctggtggtgaagagcagtcctgggcacaggctgtgagccagggtgctgggaaactcacagctggactcaggggacacggcctgtggcctcaccatcccagagggcttcaccagtgtgggatccacctgtcagtccccagcgactctcatgacactcattctgcagcaccgcctcttggggcagtggtcagaccccacacgccctctctgggcccaccacctgcatctgcgactagagagcacccggcccacgttgggttctcagtgctttctactgcacagagtggacagcgctaactaacctgtgagaggggcccgagagaaggaacagctgtggaacaggctttttacaccccaagtgcatggggttgctcgcccacagggctgcctcagattttgtacaaccccgaagcgtcctctgcgtgtgcgtgctgtacgtgtgtgtgtgtgtgtgagcgagtgtgaactcttcaagaaacatgcattttggcacaagactcgtgacatcacacacttcattcgctttgaggccctgctttaaccttaagttatagccctgtccaccgaggaaggtcagggtgagagcctagattcctcctgtgtcaagggtccctcgcattcttttactgtaaacaaacaatgccttaaattgtgtcttgttttctgttcctatgggtgctattcatctggaaggcctgcttccaggcctctttgctgtcagcccttctgagacaggacctggcttcaggactgtggactgggctgctggcctgcttgcttcctcccttccccattcctagcagggcctgaggccctcctcttctcgcccttcccaccatgccagaatgggaagttgtgacgttgcagctccaaccgacgtgctcatagtgatcagctgtgcaggagccatgaggcaccaacctctccccgcagggcaaagcctgtgcccccatcatctcactcctttgcctgcactgccagggtggggcccaccaagattcctgatcatgacgggaagctgagtgaccctgaggccttaagcttccccagtcttggccccaaatgcagtcaccagcaagttttccattttccaagtccaagggcacaattgttgatgaccgtgtgacaatagagcgaagccccggggagtgaacggtccaacctctgcattcagttaggagctcttcacatgaatcacatccttatctgtcaccttgtgtcacattttaaagtgacttttattttgcacaaataatttttattcagaataataaatcactctttatcatagtatcttctcttccctcttcccctttagtttggatagcctaactctgagaagttaacccttaaacagttttctggaagagactgaatttctgggtccttgcagctgtgatggtttcagagctcagactgatcaggcatcaagctaccctcaagagtttctgggctggatgtttcagaacaacatctacaccagtaaagtgtaataggtcagtttcaaaacgaccaaaagacccaccactgtattttgaccaaataatgacaacttctttagaaatttgaatggcttggtgaggaaagtagttgtcaccagggcctcattttgtagttgagccttacaatgcttagtagttcatcttctttttgagcaaagactagaatactttcctcctaagagaaactcccaggtgataaaagttgatgccatcaaaccttgacaccgggtgctctgcacacccacgcggatgttgcacctcattctcccgatgactattcaaatcagcatctagaggctgaatgacaatgccaaacactccacctctgatcagaaccatgcagtgttaacactttaacctacattgaatctgattctacctgttaacttttaaaaagtcgtaagtttggatgaaagtgcaagatgtggaacatcaactacctattttccttgggtttttccactctgcaaactgtcctggtttttcacaccaatgaagtattatagatgccaatccaaaacctcagaatttcaggcaccacaaaaacaggtaattttctatcccttataagtttgtcttttctttcagaaacatctcttagcctaatttgaaatagcacaatcacaattcaaaatgtttagtcttctcactaattgagtctgcttccacgtcctctcccaggaacattcttagctcggactcttgaagaatctctttagattttgttggcaaaagccttatagaagcagtaagaggcttgaccacgccggaagagtcctggagctaaagctggaagacactcagctctctaagcaggggctcggccaaacatgggagttaagtgctgcttgtcttcccagtgttggtttgaaccctgtgagcctgagacagagagggccaggcaccaaccacaaggcgggaaagtccatgggtagaccctccccctggagggaagcatttctagtttttgctccttgactgtccagagtgtacaaatgttcataacgccattgaagggattatttcttgcatgcatatgctgaatttttttaagcaaatggatcatggcaccccaaaatgaaagttatagaaagctgtctacaactgtggagttggtagctggtaacattgttgtctcaagaacaactcacctctctccctaggactaatttttgtctctctcagttgaacatgttttgtcattcaagatcagtcaggtgcattctggcaactgacatacttgatggaggattgattcggtagagagcagtagaaatcttgttctaactgtgcctggtgagagactttggccccctccctccctataaggctgtggaacctgaggaagtagatacttgaagagattctgtttaggaagaaactcactctcttttgccagttgaatttatagagcattttttttcttaccaagatggccagtatcattttacccccacctcccaagccccaagaggtgtaccttttcagatgccattttacaggcggaaatgctccatgaaacaggaagccacttgcaagcaacatctgctctgttcctcaggtggggcccagagcccttccccgagactgctgatgtctgtaaccactggggagcactgccaaaaatacagctttctggtttgtgagcccataaatgacttaaatcagctttacatcatttttacatatcaagtggtttcatgttaaaaaacaaactcctagtcctttagaaataacagattctctgcacaaaaccacccattcattcatttattcattcacagcactagcaagtgctgcctatgctgagaacaagtcagatctgatccctgccctcatggacctgaccactcaacaaacagtccccaccacacctatctccttaggcaagactttgcctctctcctagtcctgagtataaatcctgtgcatagattcctctagaaaggcatcaaaaggctcaacagactgaatggcctcttggtctgcgaaaattcagttgcaatgaggatgaagtcactatcctagaggctgcttggcccagaagagccaggcacagagctgcagttgggcacgccaaggattccaaaggtggaatgagagagtagggtcaaactgtcacagtatctgctccataggtttctgtttttaatttcaatgttaaatacaactacaatatgagcgagaactgcattttcttgggtgttgagaacttgtaccatggacttcagaccgccttgcagccgtatgctgcacaagcgtgtacaccccctgggcagcctcaaaaccccgcttacagcagcaacacaggagatcatctgtccattttagaaccattaatctctttatccattgctgaacgactgtgactattcagtaacgaagtaatagtaattaattagtatggtataatctttaataaatttcgtgccaaaatgcatggttttccacttagcattcaaaatgttgcatagagagtagttttcaatttcttatgtactcttcgaagtaagttgaaaatcagtttctacattttaattcgtttcctgttaaatctgttgcactctcctgggctgtctttttctccagcagacccctgcatgcagttgtgtaaggactttctctaattcttgtgaatcgtctcacccgcagtaaccactgaacgtcaatcagccctccatggggttctttcgatttttggtgaagtattttgttacctcagtcttgtatcaagttgctgtatttttcagcttgttacattgataataattatttcactaattaaatactttaatgtacaaacatctttgtttactttgaaattaaatgtgttttccaatg

SEQ ID NO: 1530 - protein, 557 aa, Homo sapiens
MYKRNGLMASVLVTSATPQGSSSSDSLEGQSCDYASKSYDAVVFDVLKVTPEEFASQITLMDIPVFKAIQPEELASCGWSKKEKHSLAPNVVAFTRRFNQVSFWVVREILTAQTLKIRAEILSHFVKIAKKLLELNNLHSLMSVVSALQSAPIFRLTKTWALLNRKDKTTFEKLDYLMSKEDNYKRTREYIRSLKMVPSIPYLGIYLLDLIYIDSAYPASGSIMENEQRSNQMNNILRIIADLQVSCSYDHLTTLPHVQKYLKSVRYIEELQKFVEDDNYKLSLRIEPGSSSPRLVSSKEDLAGPSAGSGSARFSRRPTCPDTSVAGSLPTPPVPRHRKSHSLGNNMMCQLSVVESKSATFPSEKARHLLDDSVLESRSPRRGLALTSSSAVTNGLSLGSSESSEFSEEMSSGLESPTGPCICSLGNSAAVPTMEGPLRRKTLLKEGRKPALSSWTRYWVILSGSTLLYYGAKSLRGTDRKHYKSTPGKKVSIVGWMVQLPDDPEHPDIFQLNNPDKGNVYKFQTGSRFHAILWHKHLDDACKSNRPQVPANLMSFE

SEQ ID NO: 1531 - DNA, 1649 bp, Homo sapiens
gcggacggttcctactgcggctgggcaccggctccgctcccgcgtctgcccgcgctccagctgcgcctggcccggccccggcccggctcggcgtggccccggcctccaagcgaaggcgccgctgccgctgggccgctcccagggccatgaggaagcggcggcagccactgcggcccgcgtcaaggtgaccggccgggactgcggcggcggggagagcggcggacttctccagacaggttatgttacctgcagaggctgccctgaagctccctgtggcctggagactatgtacaagaggaatggtctgatggctagcgtgttggtcacctctgccactccacagggcagcagcagctcggactctctggagggccagagctgcgactatgccagcaagagctatgatgccgttgtcttcgatgtcttgaaagtgaccccagaggagtttgctagccagattacattaatggatatacctgtgtttaaagctatccagccggaggaactagccagctgtggatggagtaagaaggagaaacacagtcttgcccctaacgttgtggcctttacccggaggtttaaccaggtcagtttttgggttgtacgagaaattctaacagcacagactttaaaaataagggcagaaatcctcagccattttgtgaaaatagccaagaaacttctagaactcaacaaccttcattctctcatgtctgtggtatcagcattacaaagtgctcccatcttcaggctgacaaaaacctgggctcttttaaatcgaaaagacaagactacctttgagaaattggactacctgatgtcgaaagaagataattacaagcggacacgggaatatatccgaagcctgaagatggttccaagtattccctatctaggaatctatcttctggatttaatctacattgattctgcatatcctgcctcaggcagtatcatggaaaatgaacaaagatccaatcagatgaacaatattcttcgaataattgctgatttacaagtttcctgcagctatgatcacctcaccaccctgccccatgtgcagaagtacctgaagtccgtacgctacattgaagagctccagaagtttgtggaagacgacaactacaaactgtcgctcagaatcgaaccaggaagcagctctccaagactagtctcttccaaggaagatcttgcagtctcccatctcagcagcctgtcacatcaaggtcaagcagaagaggcaagactcaaacccacctctggccaacaccctgcctggatgtggcccagctcctcacgagtaccagcggctcccccagcatctgctgctccgcgctccccgtggcctaggaatctaagaaatgatcaaggtcaaccaggtgcagtggctctcacctgtaatcccagcactttgggaagccgaagcaggaggatcacttgagcccaggagttcaagaccagcctgggcaacatggcaaaaccccatctctacaaaagtatataaatgatctgggcatggtggtgcgtgcctacagccccagctcctcagggcttaggcgagatcgcttgatcccaggagggggaggctacagtgagccgtgatcgcgccaccgcgctccagcttgggtgacagagcaagaccttgtctc

SEQ ID NO: 1532 - protein, 384 aa, Homo sapiens
MYKRNGLMASVLVTSATPQGSSSSDSLEGQSCDYASKSYDAVVFDVLKVTPEEFASQITLMDIPVFKAIQPEELASCGWSKKEKHSLAPNVVAFTRRFNQVSFWVVREILTAQTLKIRAEILSHFVKIAKKLLELNNLHSLMSVVSALQSAPIFRLTKTWALLNRKDKTTFEKLDYLMSKEDNYKRTREYIRSLKMVPSIPYLGIYLLDLIYIDSAYPASGSIMENEQRSNQMNNILRIIADLQVSCSYDHLTTLPHVQKYLKSVRYIEELQKFVEDDNYKLSLRIEPGSSSPRLVSSKEDLAVSHLSSLSHQGQAEEARLKPTSGQHPAWMWPSSSRVPAAPPASAAPRSPWPRNLRNDQGQPGAVALTCNPSTLGSRSRRIT

SEQ ID NO: 1533 - DNA, 818 bp, Homo sapiens
ctgcggctgggcaccggctccgctcccgcgtctgcccgcgctccagctgcgcctggcccggccccggcccggctcggcgtggccccggcctccaagcgaaggcgccgctgccgctgggccgctcccagggccatgaggaagcggcggcagccactgcggcccgcgtcaaggtgaccggccgggactgcggcggcggggagagcggcggacttctccagacaggttatgttacctgcagaggctgccctgaagctccctgtggcctggagactatgtacaagaggaatggtctgatggctagcgtgttggtcacctctgccactccacagggcagcagcagctcggactctctggagggccagagctgcgactatgccagcaagagctatgatgccgttgtcttcgatgtcttgaaagtgaccccagaggagtttgctagccagattacattaatggatatacctgtgtttaaagctatccagccggagaaaggctggcctgccagaatggaagactccctgcagaagtccacagtttcctccaggccacatgacacgttgcagttcaggaaaacactgcctgtgggtccaggaacctgaccctctggccttttgtctggatgccgtttgcctgctctgaagaagcgggcgttccagaaagccgaggtcaatgttggacgtcggacaaaccctgtgtgtctttgctgctccttggaatcagtgtttggccctcggagagggaagaatgtggccagcaggcagtcatttgtaaagtggagattggtttccctgacatcattaaaacccctctctcaggtc

SEQ ID NO: 1534 - protein, 198 aa, Homo sapiens
AAGHRLRSRVCPRSSCAWPGPGPARRGPGLQAKAPLPLGRSQGHEEAAAATAARVKVTGRDCGGGESGGLLQTGYVTCRGCPEAPCGLETMYKRNGLMASVLVTSATPQGSSSSDSLEGQSCDYASKSYDAVVFDVLKVTPEEFASQITLMDIPVFKAIQPEKGWPARMEDSLQKSTVSSRPHDTLQFRKTLPVGPGT

SEQ ID NO: 1535 - DNA, 1995 bp, Homo sapiens
gacttctccagacaggttatgttacctgcagaggctgccctgaagctccctgtggcctggagactatgtacaagaggaatggtctgatggctagcgtgttggtcacctctgccactccacagggcagcagcagctcggactctctggagggccagagctgcgactatgccagcaagagctatgatgccgttgtcttcgatgtcttgaaagtgaccccagaggagtttgctagccagattacattaatggatatacctgtgtttaaagctatccagccggaggaactagccagctgtggatggagtaagaaggagaaacacagtcttgcccctaacgttgtggcctttacccggaggtttaaccaggtcagtttttgggttgtacgagaaattctaacagcacagactttaaaaataagggcagaaatcctcagccattttgtgaaaatagccaagaaacttctagaactcaacaaccttcattctctcatgtctgtggtatcagcattacaaagtgctcccatcttcaggctgacaaaaacctgggctcttttaaatcgaaaagacaagactacctttgagaaattggactacctgatgtcgaaagaagataattacaagcggacacgggaatatatccgaagcctgaagatggttccaagtattccctatctaggaatctatcttctggatttaatctacattgattctgcatatcctgcctcaggcagtatcatggaaaatgaacaaagatccaatcagatgaacaatattcttcgaataattgctgatttacaagtttcctgcagctatgatcacctcaccaccctgccccatgtgcagaagtacctgaagtccgtacgctacattgaagagctccagaagtttgtggaagacgacaactacaaactgtcgctcagaatcgaaccaggaagcagctctccaagactagtctcttccaaggaagatcttgcaggtccctctgctggctccggttctgcgaggttcagccggaggcccacctgtcctgacacatctgttgctggcagcctccccacacctccagtccccagacacaggaagagccacagcctaggcaacaacaggggacgtctctatgccaccctggggcccaactggcgggttccagttaggaattctcccagaacccggagctgtgtctacagccccaccggcccgtgcatctgttctctggggaactccgcagctgtgcccaccatggaggggcctctgagaagaaaaaccctgctcaaggaagggcggaagcctgcgctgtcctcgtggaccaggtactgggtcatactctcaggatccaccctcctgtactacggagccaagtccttgcggggcacagacagaaaacacgtttccatcgtgggctggatggtgcagctgcccgatgaccccgagcacccagatatcttccagctgaacaaccctgacaaaggcaatgtttacaagtttcagactggttcccgatttcatgcaatactgtggcacaagcatttggatgatgcatgtaaaagcaacaggcctcaggaagccggagcagctccaggtccaacaggaactgacagccacgaggtggaccacctggagggcggtgcggggaaggaggcagggccctgtgcctgaagcctgggcaccatggtggccccagtcaggagcaacagtggtagccctgagtaaaacccattgtccctctttggaggagcggccagaggatgacagcagccccagcaggcagcagtgcctgggcaggctgatccagcagagcactaatgggtcagtttcatgtattggcagatgtggtgtagcatggcaaggctacaagttttaaggatttttgtctgattttcagacctggaggaggggatttttcttcctactttcccccttttttatttctaatttactttcaaccaaatattcccactatgtgctatatgtaataataaaaagttgacaacaactg

SEQ ID NO: 1536 - protein, 529 aa, Homo sapiens
MYKRNGLMASVLVTSATPQGSSSSDSLEGQSCDYASKSYDAVVFDVLKVTPEEFASQITLMDIPVFKAIQPEELASCGWSKKEKHSLAPNVVAFTRRFNQVSFWVVREILTAQTLKIRAEILSHFVKIAKKLLELNNLHSLMSVVSALQSAPIFRLTKTWALLNRKDKTTFEKLDYLMSKEDNYKRTREYIRSLKMVPSIPYLGIYLLDLIYIDSAYPASGSIMENEQRSNQMNNILRIIADLQVSCSYDHLTTLPHVQKYLKSVRYIEELQKFVEDDNYKLSLRIEPGSSSPRLVSSKEDLAGPSAGSGSARFSRRPTCPDTSVAGSLPTPPVPRHRKSHSLGNNRGRLYATLGPNWRVPVRNSPRTRSCVYSPTGPCICSLGNSAAVPTMEGPLRRKTLLKEGRKPALSSWTRYWVILSGSTLLYYGAKSLRGTDRKHVSIVGWMVQLPDDPEHPDIFQLNNPDKGNVYKFQTGSRFHAILWHKHLDDACKSNRPQEAGAAPGPTGTDSHEVDHLEGGAGKEAGPCA

SEQ ID NO: 1537 - DNA, 4551 bp, Homo sapiens
ttgagctcaaagcttagcagcttcaatgttgttgttaggcataaacagcttgcaaatttcaattttttttctctcctcacttttgaactagatttgggcaatggaggtgatgacagcattttagaagacagaacaggaattctaggtgtttaggcacgttgaagagaaacttgctagaggtgatgaagtggaaagaaaaagacaattcactatagggatcaacattattgcagttctgcaaaggatattttcttttaaaacatccatatctcttctttgccatggaaactacacccaatctacctgaacctgcggcacccctctgatgacccatttggattctctgatttcactgccaagattctcagttctccaaaatacttatcattcaggttgaataaaccagttctacagactgcttcttccatgcatttcccaatgatgctagctgcccttaaaattctttcagatttggaactgtatctgtatggaaacaacagagttttcttgaagtacaactaaggacaggtcaccactaggcactaacatcgctgacttgcatgattatggagatggtctatctgatgctgaaaatgtctctagttttttgacaacggctaaataaccatgggatcaagtggccttgggaaagcagcaacattagatgaactgctgtgcacttgcattgagatgtttgatgacaatggagagctggataatagttatttgccaagaatagttctactgatgcaccgatggtatttatcttccactgaattggcagaaaaacttctctgcatatatcttttcaactactgtgtaatttttacaatcataaatcaagctctgtatttagatagagtgtactggattctgaagtttcctgcagagtttaatttggatcttggtttgattcgtatgactgaggaatttcgggaagtagctagtcaactaggatatgaaaaacacgtcagcctcatcgacatatccagcattccttcctatgactggatgagaagagtcacacagaggaaaaaagtatccaagaagggaaaagcctgtctgctgtttgaccatctggagcccattgaattggctgagcacctcacttttctggagcataaatcttttagaaggatctcattcactgattaccaaagctatgtcatccatggctgcctggagaataatccaaccttggaaagatcgattgctttatttaatggaatctctaagtgggtccagttgatggttcttagcaaaccaaccccccagcaaagggcagaagtcatcacaaagtttatcaatgttgcaaagaagctccttcagctcaaaaattttaacaccctgatggcagtggtgggaggcctcagtcatagttccatttcacgcctcaaagagacccattctcatctttcttcagaagttacaaagaactggaatgaaatgacagagttggtctcctccaacggcaattactgcaattaccgcaaggcctttgccgactgcgatggcttcaaaatccccatccttggagtacacttgaaagacttgatagctgtccatgtcattttcccagactggacagaggagaacaaagtgaacattgtgaaaatgcaccagctctccgttaccctgagtgaactagtctccctgcagaatgcctctcaccacttagaacccaacatggatttgatcaacctgctcacgctttccctggacctctatcacactgaagatgatatttacaaactgtcactggtgctggagcctagaaattctaaatcgcctacctcccctacgacgcccaacaagcctgtggtacccctggagtgggcattaggggtgatgccaaagccagaccccacggtcatcaacaagcacataaggaaattagtggagtctgtatttagaaactatgatcacgaccatgatgggtacatttcccaagaggactttgaaagtatagctgccaattttcccttcttggattccttctgtgttctggacaaagatcaggatggcctaattagtaaagatgaaatgatggcttacttcctgagagctaaatcccaactacactgtaaaatgggaccaggatttatccataattttcaggagatgacctatctcaagccaaccttctgcgaacactgtgcgggatttctctggggcataatcaagcaaggatacaaatgcaaagactgtggagccaattgtcacaaacagtgcaaagacctcctggttctggcctgcaggagatttgcccgggcgccctccttgagcagtggtcatgggtcactgcctggaagcccctcgctgcccccagcgcaggatgaggtgtttgagttccctggagtcactgctggacacagggatttagacagcagagccatcacactggttacaggctcttctcgcaagatctctgtgaggctacagagggccaccaccagccaggccacccagactgaacctgtctggtcagaggctggctggggggactcggggtcccacaccttccctaaaatgaaatccaagttccatgacaaagcagcaaaggacaaaggctttgccaaatgggaaaatgagaagcccagggtgcatgctggtgtggatgttgtagaccggggcacggagtttgaacttgaccaggatgaaggagaagagaccagacaggatggtgaggatggctgacttcaggctgcggaaactgaaggcaataatgttggcttttggaaggggcaagacgagaaactctgaagaaagctctgactctcaggaagttatctggaaagatacctggatgtttactgccttgggacactgtgggatctccatgtttggactatgggacagagaattgaccctaactaactaactatgaactatttatttcctcctcccctacccctagttaagtgccacaaagactgtgttatgtagtcagtacttttttctcatgtatctttctctagaccatttatatacgggtgaaatgaaagcttttttgcatgtacttgatactcagtctgtaaactcagacttcgctttttttgtgagactatcctttcaatatttttataaacttttgtgtgtgctgtggcagggaacagttaacaaggagtttatttagaggggtttttttcattttttgtttttcttgttttgttttgttttgttttgttcttcttggtgtgctttttggatgggaccagaacttaacattttcctgaggactaggaagctcatcagacactggaatgcagtgattcttctaatgatggtcaactgcaaggagaaactgtttacatccttcccactacacagttgctatgatatgtaacaagtcacacatgtatatatcacacaagtcttaccaattctgcgtcactaggaagctatagcatggtcgtgaaagctctcctaatacttacttaaatagccatggaagaaaattatgcttgtcccttctgactgggttaagccatctttcttaagattcctgaagtagaaatagcaattaagaaattaattcaagttttgacggttaacatttagcagaaaaacaaaccattgaataagctactaggtgaaatgcaaaacaaccatcaatttttttaaactcaataattttgtgaaaaaaaaaaccaccaccaaacttttggttgtaaaagagaacccttgttcccttcctaagaaactgccttccacaattaaagaatactcatagaaagaaaataatcataaatcatatttgattaacatttcatttaagcttttaaaatatcaattttttaaatagctcccatttacccaaaataactagttatgggtctatttcttccatgattagaggagagagaacttgattcaagatactgaaaaatagagctgggactgagcctgtgaatgacaggaatgatctattaccaggtgactagtcggaaactacacagacgtgcactggtctgcatttgggggctaaagtgtatatattccatttaaaatggaatttgtttgtatttggggcagtcttcagtaaagcctttctcctttcttttctccattgaggacagttctgctcagcaaaattgttgagtacctgttctgggcaggtcccacgctatatgcacaaagttaagaaaaacttggtcttagcccttgggagctgacagcccatgggcattaaggcaaagtagttccagtgatttaaaatacggttccaaatacgctaaaaccaacttgtgccaaccagatttacagattggaaatactgcagatgatgtgaagttatcagttggaggagctgtgattaagctggataataagagaacgtgccatctgtaaagcactcagaaggcagccatccctagatgttggtttcatgtatattacactatctactactatccataaatgcaataatatgcatgttaacaacattaaaaacagcaaacagcaatctaagtacagaaaagctttttgtgtgtttaaaaaaattgaagaaaattcaggaagaaacgtgttaataaacattgtactgttctt

SEQ ID NO: 1538 - protein, 552 aa, Homo sapiens
MGSSGLGKAATLDELLCTCIEMFDDNGELDNSYLPRIVLLMHRWYLSSTELAEKLLCIYLFNYCVIFTIINQALYLDRVYWILKFPAEFNLDLGLIRMTEEFREVASQLGYEKHVSLIDISSIPSYDWMRRVTQRKKVSKKGKACLLFDHLEPIELAEHLTFLEHKSFRRISFTDYQSYVIHGCLENNPTLERSIALFNGISKWVQLMVLSKPTPQQRAEVITKFINVAKKLLQLKNFNTLMAVVGGLSHSSISRLKETHSHLSSEVTKNWNEMTELVSSNGNYCNYRKAFADCDGFKIPILGVHLKDLIAVHVIFPDWTEENKVNIVKMHQLSVTLSELVSLQNASHHLEPNMDLINLLTLSLDLYHTEDDIYKLSLVLEPRNSKSPTSPTTPNKPVVPLEWALGVMPKPDPTVINKHIRKLVESVFRNYDHDHDGYISQEDFESIAANFPFLDSFCVLDKDQDGLISKDEMMAYFLRAKSQLHCKMGPGFIHNFQEMTYLKPTFCEHCAGFLWGIIKQGYKCKDCGANCHKQCKDLLVLACRRFARAPSL

SEQ ID NO: 1539 - DNA, 2366 bp, Homo sapiens
atctgccaccgcagtctggttggagctgttgtcttgtatgctcagcgaggcccggagagacccgggagagagctaggccgagtccaccgcccgagtctgctgcccgagcccgcgttacgcacaaagccgccgatccccggcctggggtgagcagagcgaccaccgcccgggagcagcgcggcgagacgcacggtgcgccctatgcccccgcgcccccaccgcccccgccgcggcagccgaagcgcagcgagagaacgcgccaccgcggggcccgggtgcagctagcgaccctctcgccacctgcgcgcagcccgaggtgagcagtgagcggcgagcgggagggcagcgaggcgttcgcgggccccctcctgctgcccgggcccggcccgctcatggcggccatccgcaagaagctggtggtggtgggcgacggcgcgtgtggcaagacgtgcctgctgatcgtgttcagtaaggacgagttccccgaggtgtacgtgcccaccgtcttcgagaactatgtggccgacattgaggtggacggcaagcaggtggagctggcgctgtgggacacggcgggccaggaggactacgaccgcctgcggccgctctcctacccggacaccgacgtcattctcatgtgcttctcggtggacagcccggactcgctggagaacatccccgagaagtgggtccccgaggtgaagcacttctgtcccaatgtgcccatcatcctggtggccaacaaaaaagacctgcgcagcgacgagcatgtccgcacagagctggcccgcatgaagcaggaacccgtgcgcacggatgacggccgcgccatggccgtgcgcatccaagcctacgactacctcgagtgctctgccaagaccaaggaaggcgtgcgcgaggtcttcgagacggccacgcgcgccgcgctgcagaagcgctacggctcccagaacggctgcatcaactgctgcaaggtgctatgagggccgcgcccgtcgcgcctgcccctgccggcacggctccccctcctggaccagtcccccgcgagcccggagaaggggagacccgtgtcccacaaggaccccaccggcctgcctggcatctgtctgctgacgcctctggcttgcgccaggacttggcgtgggcaccgggcgcccccatcccagtgtctgtgtgcgtccagctgtgttgcacaggcctgggctccccactgagtgccaagggtcccctgagcatgcttttctgaagagccgggcctcagagtgtgtggctgtgtgtctgttcgactcccctcgccccattttcaccccacccccgcctctgatccccgggggcgagattggcgcgggagtgtggccgcgccccatcagatgttcgcccttcaccagcgggagcttgatatcccttgtctgtaacatagaccccgggtactgcgggaggggagggctgctggggaggatggggggatgttatataaatatagatataattttattttcggagctaagatggtgttatttaagggtggtgatgggtgagcgctctggcccaggctgggccagactcccgcccaagcatgaacaggacttgaccatctttccaacccctggggaagacatttgcaactgacttggggaggacacagcttcagcacagcctctcctgcgggccagcccgctgcgaaccctccaccagctaccggagggaggagggaggatgcgctgtggggttgtttttgccataagcgaactttgtgcctgtcctagaagtgaaaattgttcagtccaagaaactgatgttatttgatttatttaaaggctaaaatttgtttttttattctttgcacaattgtttcattgtttgacacttaatgcactcgtcatttgcatacgacagtagcattctgaccacacttgtacgctgtaacctcatctacttctgatgtttttaaaaaatgacttttaacaaggagagggaaaagaaacccactaaattttgctttgtttccttgaagaatgtggcaacactgttttgtgattttatttgtgcaggtcatgcacacagttttgataaagggcagtaacaagtattggggcctattttttttttttccacaaggcattctctaaagctatgtgaaattttctctgcacctctgtacagagaatacacctgcccctgtatatccttttttcccctcccctccctcccagtggtacttctactaaattgttgtcttgttttttattttttaaataaactgacaaatgacaaaatggtgagcttatgatgtttacataaaagttctataagctgtgtatacagttttttatgtaaaatattaaaagactatgatgatgacattt

SEQ ID NO: 1540 - protein, 196 aa, Homo sapiens
MAAIRKKLVVVGDGACGKTCLLIVFSKDEFPEVYVPTVFENYVADIEVDGKQVELALWDTAGQEDYDRLRPLSYPDTDVILMCFSVDSPDSLENIPEKWVPEVKHFCPNVPIILVANKKDLRSDEHVRTELARMKQEPVRTDDGRAMAVRIQAYDYLECSAKTKEGVREVFETATRAALQKRYGSQNGCINCCKVL

SEQ ID NO: 1541 - DNA, 3301 bp, Homo sapiens
caaccctacccagatctcctcccccaggcctggtctcctcacaggacgccccctccccgctcttcctgccgggtttcctcttgccttttcctgtcccccacccagtgctgggagccgtggcagaggcaagagcagtggaactgacccaggccagtggagccagggcctccgggtgtgccggacccgaagcaggggccatgctgtctggtgaacggaaggagggcggaagcccccgcttcgggaagcttcatctccccgtgggcctgtggatcaattcccccaggaagcagctggcgaagctggggcggcgctggcccagcgcagcctctgtcaagtcttcttcgtcggacacggggagccgcagcagcgagccgctacctccgcccccgccgcacgtggagctgcggcgagtgggcgctgtcaaggcggccgggggagcctccggtagccgcgccaagcgcatctcccagctcttccggggctcggggaccgggaccacggggtccagcggcgcaggaggccctgggaccccggggggcgcgcagcgctgggccagcgagaagaagctgccggagctggcggcgggcgtggcccccgagcccccgctggctacccgcgccacggcgcctccgggggtcctcaagatcttcggcgccggactggcatcgggcgccaactacaagagcgtgctggccacggcgcgctccacggcgcgcgagctcgtggccgaggcgctagagcgctacggcctagcaggcagccccggcggtggccccggcgagagcagctgcgtggacgccttcgctttgtgcgacgctctgggccggcccgcggcggcgggcgtgggaagcggcgagtggcgggcggagcacctgcgcgtgctgggcgactccgagcgcccgctgctggtgcaggagctgtggcgggcgcggcccggctgggcgcggcgcttcgagttgcgcggccgcgaggaggcgcggcgcctggagcaggaggccttcggggccgcggacagcgaaggcaccggcgccccttcgtggcggccacagaagaaccgctcccgggcggcgtcgggtggggcagcgctggccagtcctggcccggggaccggatcaggggccccagctgggtctggaggcaaggagcgctcagaaaacttgtctttgcggcgcagcgtgtcggagcttagccttcaggggcggcggcggcggcagcaggagcggagacagcaggcacttagcatggccccaggggcagccgacgcccaaatcggaactgcagaccccggggacttcgatcagttgactcagtgcctcatccaggcccccagcaaccgcccctacttcctgctgctccagggctaccaggacgcccaggactttgtggtgtatgtgatgacgcgagagcagcacgtgtttgggcgaggtgggaactcgtctggccgcggggggtccccggctccctatgtggacaccttcctcaacgccccggacatcctgccgcgtcactgcacagtgcgcgcgggccctgagcacccggccatggtgcgcccgtcccggggcgccccagtcacgcacaacgggtgcctcctgctgcgggaggctgagctgcacccgggcgacctcctggggctgggcgagcacttcctgttcatgtacaaggacccccgcactgggggctcggggcctgcgaggccgccgtggctgcccgcgcgccccggggccacgccgccaggccctggctgggccttctcctgtcgcctgtgcggccgcggcctgcaggagcgcggcgaggcactggccgcctacctggacggccgtgagccagtcctgcgcttccggccgcgcgaggaggaggcgctgctgggcgagatcgtgcgcgccgcagccgccggctcgggagacctgccgcccctcgggcccgccacgctgctggcgctgtgcgtgcagcattccgcccgtgagctggagctgggccacctgccacgactgctgggccgcctggcccggctcatcaaggaggccgtctgggaaaagattaaggaaattggagaccgtcagccagaaaaccaccctgagggggtccccgaggtgcccctgactcctgaagctgtgtctgtggagctgcggccactcatgctgtggatggccaacaccacggagctgcttagctttgtgcaggagaaggtgctggaaatggagaaggaggctgaccaagaggacccacagctctgcaatgacttggaattatgtgatgaggccatggccctcctggatgaggtcatcatgtgtaccttccagcagtctgtctactacctcaccaagactctctattcaacgctgcctgctctcctggatagtaaccctttcacagctggtgcagagctgccggggcctggcgcggagctgggggccatgcctccaggattgagacctaccctgggcgtgttccaggcagccttggagctgaccagccagtgcgagctgcaccctgacctcgtgtctcagacttttggctacttgttcttcttctccaacgcatcccttctcaactcgctgatggaacgaggtcaaggccggcctttctatcaatggtcccgagctgttcaaatccgaaccaacctggacctcgtcttggactggctacagggagctgggctgggcgacattgccactgagttcttccggaaactctccatggctgtgaacctgctctgtgtgccccgcacttccctgctcaaggcttcatggagcagcctaagaaccgaccaccccaccttgacccccgcccagctgcaccatctgctcagccactatcagctgggccctggccgcgggccgccagccgcgtgggaccctccccctgcagagcgggaggctgtggacacaggggacatcttcgaaagcttctcctcgcacccgcccctcatcctccccctggggagctcgcgcctgcgcctcactggtccagtgacggacgatgccttgcaccgtgaactccgtaggctccgccgcctcctctgggatcttgagcagcaggagctgccagccaattatcgccatgggcctcccgtggccacgtctccttgagaaccaataccaaacgagcgcgcgaaccttgaaatgtcacgggcttctacggacaggagcccgcctgagcgcaaagctttctgggagttgtagttcttatcccgcgtggaatgttgggagattgagttttcgggaagtagcggatgggacggtgggagcatgggcttaggatgtgaatgccagggagcaataaaggtatccgtggtatcggc

SEQ ID NO: 1542 - protein, 963 aa, Homo sapiens
MLSGERKEGGSPRFGKLHLPVGLWINSPRKQLAKLGRRWPSAASVKSSSSDTGSRSSEPLPPPPPHVELRRVGAVKAAGGASGSRAKRISQLFRGSGTGTTGSSGAGGPGTPGGAQRWASEKKLPELAAGVAPEPPLATRATAPPGVLKIFGAGLASGANYKSVLATARSTARELVAEALERYGLAGSPGGGPGESSCVDAFALCDALGRPAAAGVGSGEWRAEHLRVLGDSERPLLVQELWRARPGWARRFELRGREEARRLEQEAFGAADSEGTGAPSWRPQKNRSRAASGGAALASPGPGTGSGAPAGSGGKERSENLSLRRSVSELSLQGRRRRQQERRQQALSMAPGAADAQIGTADPGDFDQLTQCLIQAPSNRPYFLLLQGYQDAQDFVVYVMTREQHVFGRGGNSSGRGGSPAPYVDTFLNAPDILPRHCTVRAGPEHPAMVRPSRGAPVTHNGCLLLREAELHPGDLLGLGEHFLFMYKDPRTGGSGPARPPWLPARPGATPPGPGWAFSCRLCGRGLQERGEALAAYLDGREPVLRFRPREEEALLGEIVRAAAAGSGDLPPLGPATLLALCVQHSARELELGHLPRLLGRLARLIKEAVWEKIKEIGDRQPENHPEGVPEVPLTPEAVSVELRPLMLWMANTTELLSFVQEKVLEMEKEADQEDPQLCNDLELCDEAMALLDEVIMCTFQQSVYYLTKTLYSTLPALLDSNPFTAGAELPGPGAELGAMPPGLRPTLGVFQAALELTSQCELHPDLVSQTFGYLFFFSNASLLNSLMERGQGRPFYQWSRAVQIRTNLDLVLDWLQGAGLGDIATEFFRKLSMAVNLLCVPRTSLLKASWSSLRTDHPTLTPAQLHHLLSHYQLGPGRGPPAAWDPPPAEREAVDTGDIFESFSSHPPLILPLGSSRLRLTGPVTDDALHRELRRLRRLLWDLEQQELPANYRHGPPVATSP

SEQ ID NO: 1543 - DNA, 1543 bp, Homo sapiens
gggcctcccaaagtgctgggattacaggcgtaagccaccgcgcccagccccttagcaccttttaaaaataaaaagggcagcgttttacagcaatctgtcccattgttgcagaaacatccaactgattgcactttttcttcttctctcgtcaactcgtaactcctatctcaagttcacccacaggtctagtgactccggctggctgctgcggggcgaggagactcgcagaatgcctgactagaggccactcgcgcgctctggacggtggccgtatctccagggtctgagccccggagccgcagtcctgccgcagagcgcctggagccgcgagcagctagcagcccggcgaagcgcacagcctcggcgatagtcagctccgcggcctctgctcccgcccctcccggccgctccgggaaggggcggagacgaggaggagctgggacggccgccgcgctcccgggcgcaccaagccctttaaaagccgcgggccttgacagttctgcaggcagccgccgcggtcccggacctctagtcccgcactcccagctggcgagccggctccgggtgcggcgaggcccagccctctcggattgcgcgccggaccccgggacgcgctccatgcggccgctcagcatgtccgggcactttctgctcgcacccatccccgagtcctcctcggactacctactgcccaaggacatcaaactggcggtgctgggcgccggccgcgtgggcaagagcgcaatgatcgtgcgcttcctgaccaagagattcattggagactatgaaccgaatacaggcaagctgtattcacggctggtctatgtcgagggggaccagctctccctgcagatccaggatactcccgggggcgtccagatccaagacagcctcccccaggtcgtcgattccctgtccaaatgcgtgcagtgggccgagggttttctgctggtctattccatcacagactatgacagctacttgtccatccgacccctttatcagcacatccggaaggtccaccctgactctaaagcccctgtcatcatcgtgggcaacaagggggaccttttgcatgcccggcaggtgcagacacaggacggtattcagctagccaatgagctgggcagcctgttccttgaaatttccactagcgaaaactacgaagatgtctgtgatgtgtttcagcatctctgcaaagaagtgagcaagatgcacggcctcagtggggaaagaagaagagcctccatcatccctcggccccgctctcccaacatgcaggacctgaagagacgcttcaagcaggctctgtctcccaaagtcaaagccccctctgcactggggtgaactatctcagacagatgcctctcctttttaatacgcatttgtgcagctaaaagactgggcttctcgctttttaatcacacattcagagtttatttttataaaaaaattgattttcaagtacatgtgtatttctgaaaattcaaacagtgattgcctagaagctggataaaattttgttttgttttattaaaagaac

SEQ ID NO: 1544 - protein, 242 aa, Homo sapiens
MRPLSMSGHFLLAPIPESSSDYLLPKDIKLAVLGAGRVGKSAMIVRFLTKRFIGDYEPNTGKLYSRLVYVEGDQLSLQIQDTPGGVQIQDSLPQVVDSLSKCVQWAEGFLLVYSITDYDSYLSIRPLYQHIRKVHPDSKAPVIIVGNKGDLLHARQVQTQDGIQLANELGSLFLEISTSENYEDVCDVFQHLCKEVSKMHGLSGERRRASIIPRPRSPNMQDLKRRFKQALSPKVKAPSALG

SEQ ID NO: 1545 - DNA, 1547 bp, Homo sapiens
cctgaccggaccagaccatcccgcagcgccccgccccggccccctccgcgccctcccgacgccaggtcctgccgtcccgccgaccgtccgggagcgaacccgtcgtcccgcactcggagtccgcgatggcttcagtgacagatggtaaaactggagtcaaagatgcctctgaccagaattttgactacatgtttaaactgcttatcattggcaacagcagtgttggcaagacctccttcctcttccgctatgctgatgacacgttcaccccagccttcgttagcaccgtgggcatcgacttcaaggtgaagacagtctaccgtcacgagaagcgggtgaaactgcagatctgggacacagctgggcaggagcggtaccggaccatcacaacagcctattaccgtggggccatgggcttcattctgatgtatgacatcaccaatgaagagtccttcaatgctgtccaagactgggctactcagatcaagacctactcctgggacaatgcacaagttattctggtggggaacaagtgtgacatggaggaagagagggttgttcccactgagaagggccagctccttgcagagcagcttgggtttgatttctttgaagccagtgcaaaggagaacatcagtgtaaggcaggcctttgagcgcctggtggatgccatttgtgacaagatgtctgattcgctggacacagacccgtcgatgctgggctcctccaagaacacgcgtctctcggacaccccaccgctgctgcagcagaactgctcatgctaggcaaggcccaccttcctgacctcccctcattgtggccccacacccagtctgcttctccctgttacacactgtccgctctcagcccactctccctgttacacactgcccacactcagagcaagatgagttgctgctattctttgcctgcccctggggttctctgcagatggtcccagtaatagatactcagcactagactaacataacaggtcactacacgggtgcagaatcactttacaaaagaagactctgttttacgaaggggattcactacagggacttagagaacagtctcttttctgcctttaaaatgagagttcctccatttaccaaaatttgacacgcacacattcttcaggggcatgccaattgcgtaaagtgaggctcgcctgcatagctaatcctgttaaagacaacttctcaaagcacaacgtgcttgtttcctatcgggctccctgcggggctttctctcactacaagtcaagcttgggctctcaaagccctgcgcctgttaccacggatgcccacagggcctgggcagttgctgtggcgacaggaagagctaatcttcagagagctcagactctctaatgatgctgaaggagcaaaggctgagtcagaaacacacttaagagaaaaggattggccgggcgcggtggctcacgcctgtaatcccagcactttgggaggccgaggcgggtggatcatgaggtcaggagatcgagaccatcctggctaacaaggtgaaaccccgtctctact

SEQ ID NO: 1546 - protein, 219 aa, Homo sapiens
MASVTDGKTGVKDASDQNFDYMFKLLIIGNSSVGKTSFLFRYADDTFTPAFVSTVGIDFKVKTVYRHEKRVKLQIWDTAGQERYRTITTAYYRGAMGFILMYDITNEESFNAVQDWATQIKTYSWDNAQVILVGNKCDMEEERVVPTEKGQLLAEQLGFDFFEASAKENISVRQAFERLVDAICDKMSDSLDTDPSMLGSSKNTRLSDTPPLLQQNCSC

SEQ ID NO: 1547 - DNA, 983 bp, Homo sapiens
ggctcccccgcaggcggtagcgaaggcagcagcagcggtggcgacatgagcagcggggcggcgtccgggacagggcgggggcggccccggggcgggggacctgggcccggggaccccccgcccagcgagacacacaagctggtggtcgtgggcggcggcggcgtgggcaagagcgcgctgaccatccagttcatccagtcctacttcgtgtctgactacgaccccactattgaggactcctacacgaagatctgcagtgtggatggcatcccagcccggctggacatcctggacaccgcgggccaggaagagttcggggccatgagagagcagtacatgcgtgctggccacggcttcctgctggtgttcgccattaacgaccggcagagtttcaacgaggtgggcaagctcttcacgcagattctgcgggtcaaggaccgcgacgacttccccgttgtgttggtcgggaacaaggcagatctggagtcacagcgccaggtcccccgatcagaagcctctgccttcggcgcctcccaccacgtggcctactttgaggcctcggccaaactgcgtctcaacgtggacgaggcttttgagcagctggtgcgggctgtccggaaataccaggaacaagagctcccaccgagccctcccagtgcccccaggaagaagggcgggggctgcccctgcgtcctcctgtagcccaggcaagagagaagcaaccaccacaagctctcgggactagctgccttcgcaccttgctgtgtgacctgaggccctcactgagcctcaatttcctcatctgggtctcccaggacacatcacatacccacccttacttcctggcctcttctgggctactgccactgtgtgccttctgccaacgcctcctgtccccacctaagcctggtgggggtgaggggctccgggtcactgctgtatataactcccctcccccagaaaaataaatgtcactgccaacg

SEQ ID NO: 1548 - protein, 218 aa, Homo sapiens
MSSGAASGTGRGRPRGGGPGPGDPPPSETHKLVVVGGGGVGKSALTIQFIQSYFVSDYDPTIEDSYTKICSVDGIPARLDILDTAGQEEFGAMREQYMRAGHGFLLVFAINDRQSFNEVGKLFTQILRVKDRDDFPVVLVGNKADLESQRQVPRSEASAFGASHHVAYFEASAKLRLNVDEAFEQLVRAVRKYQEQELPPSPPSAPRKKGGGCPCVLL

SEQ ID NO: 1549 - DNA, 1347 bp, Homo sapiens
aaacagccggggctccagcgggagaacgataatgcaaagtgctatgttcttggctgttcaacacgactgcagacccatggacaagagcgcaggcagtggccacaagagcgaggagaagcgagaaaagatgaaacggacccttttaaaagattggaagacccgtttgagctacttcttacaaaattcctctactcctgggaagcccaaaaccggcaaaaaaagcaaacagcaagctttcatcaagccttctcctgaggaagcacagctgtggtcagaagcatttgacgagctgctagccagcaaatatggtcttgctgcattcagggcttttttaaagtcggaattctgtgaagaaaatattgaattctggctggcctgtgaagacttcaaaaaaaccaaatcaccccaaaagctgtcctcaaaagcaaggaaaatatatactgacttcatagaaaaggaagctccaaaagagataaacatagattttcaaaccaaaactctgattgcccagaatatacaagaagctacaagtggctgctttacaactgcccagaaaagggtatacagcttgatggagaacaactcttatcctcgtttcttggagtcagaattctaccaggacttgtgtaaaaagccacaaatcaccacagagcctcatgctacatgaaatgtaaaagggagcccagaaatggaggacatttcattctttttcctgaggggaaggactgtgacctgccataaagactgaccttgaattcagcctgggtgttcaggaaacatcactcagaactattgattcaaagttgggtagtgaatcaggaagccagtaactgactaggagaagctggtatcagaacagcttccctcactgtgtacagaacgcaagaagggaataggtggtctgaacgtggtgtctcactctgaaaagcaggaatgtaagatgatgaaagagacaatgtaatactgttggtccaaaagcatttaaaatcaatagatctgggattatgtggccttaggtagctggttgtacatctttccctaaatcgatccatgttaccacatagtagttttagtttaggattcagtaacagtgaagtgtttactatgtgcaacggtattgaagttcttatgaccacagatcatcagtactgttgtctcatgtaatgctaaaactgaaatggtccgtgtttgcattgttaaaaatgatgtgtgaaatagaatgagtgctatggtgttgaaaactgcagtgtccgttatgagtgccaaaaatctgtcttgaaggcagctacactttgaagtggtctttgaatacttttaataaatttattttgataaataatattgaac

SEQ ID NO: 1550 - protein, 211 aa, Homo sapiens
MQSAMFLAVQHDCRPMDKSAGSGHKSEEKREKMKRTLLKDWKTRLSYFLQNSSTPGKPKTGKKSKQQAFIKPSPEEAQLWSEAFDELLASKYGLAAFRAFLKSEFCEENIEFWLACEDFKKTKSPQKLSSKARKIYTDFIEKEAPKEINIDFQTKTLIAQNIQEATSGCFTTAQKRVYSLMENNSYPRFLESEFYQDLCKKPQITTEPHAT

SEQ ID NO: 1551 - DNA, 4102 bp, Homo sapiens
atacggacgccagctgcgggcaaggccaagaccccaccccaactcacggttacccaaagtgggggtggagctcccagctctcagccccgcccattgaacgcaatcccagccgatgagaccctttttgctcttcctgctgcatctgagcctgtgatacgctcctctgcagaaaatatggacttgaaggagcagccaggtaacactatttcggctggtcaagaggatttcccatctgtcctgcttgaaactgctgcttctcttccttctctgtctcctctctcagccgcttctttcaaagaacatgaataccttggtaatttgtcaacagtattacccactgaaggaacacttcaagaaaatgtcagtgaagcttctaaagaggtctcagagaaggcaaaaactctactcatagatagagatttaacagagttttcagaattagaatactcagaaatgggatcatcgttcagtgtctctccaaaagcagaatctgccgtaatagtagcaaatcctagggaagaaataatcgtgaaaaataaagatgaagaagagaagttagttagtaataacatccttcataatcaacaagagttacctacagctcttactaaattggttaaagaggatgaagttgtgtcttcagaaaaagcaaaagacagttttaatgaaaagagagttgcagtggaagctcctatgagggaggaatatgcagacttcaaaccatttgagcgagtatgggaagtgaaagatagtaaggaagatagtgatatgttggctgctggaggtaaaatcgagagcaacttggaaagtaaagtggataaaaaatgttttgcagatagccttgagcaaactaatcacgaaaaagatagtgagagtagtaatgatgatacttctttccccagtacgccagaaggtataaaggatcgttcaggagcatatatcacatgtgctccctttaacccagcagcaactgagagcattgcaacaaacatttttcctttgttaggagatcctacttcagaaaataagaccgatgaaaaaaaaatagaagaaaagaaggcccaaatagtaacagagaagaatactagcaccaaaacatcaaacccttttcttgtagcagcacaggattctgagacagattatgtcacaacagataatttaacaaaggtgactgaggaagtcgtggcaaacatgcctgaaggcctgactccagatttagtacaggaagcatgtgaaagtgaattgaatgaagttactggtacaaagattgcttatgaaacaaaaatggacttggttcaaacatcagaagttatgcaagagtcactctatcctgcagcacagctttgcccatcatttgaagagtcagaagctactccttcaccagttttgcctgacattgttatggaagcaccattgaattctgcagttcctagtgctggtgcttccgtgatacagcccagctcatcaccattagaagcttcttcagttaattatgaaagcataaaacatgagcctgaaaaccccccaccatatgaagaggccatgagtgtatcactaaaaaaagtatcaggaataaaggaagaaattaaagagcctgaaaatattaatgcagctcttcaagaaacagaagctccttatatatctattgcatgtgatttaattaaagaaacaaagctttctgctgaaccagctccggatttctctgattattcagaaatggcaaaagttgaacagccagtgcctgatcattctgagctagttgaagattcctcacctgattctgaaccagttgacttatttagtgatgattcaatacctgacgttccacaaaaacaagatgaaactgtgatgcttgtgaaagaaagtctcactgagacttcatttgagtcaatgatagaatatgaaaataaggaaaaactcagtgctttgccacctgagggaggaaagccatatttggaatcttttaagctcagtttagataacacaaaagataccctgttacctgatgaagtttcaacattgagcaaaaaggagaaaattcctttgcagatggaggagctcagtactgcagtttattcaaatgatgacttatttatttctaaggaagcacagataagagaaactgaaacgttttcagattcatctccaattgaaattatagatgagttccctacattgatcagttctaaaactgattcattttctaaattagccagggaatatactgacctagaagtatcccacaaaagtgaaattgctaatgccccggatggagctgggtcattgccttgcacagaattgccccatgacctttctttgaagaacatacaacccaaagttgaagagaaaatcagtttctcagatgacttttctaaaaatgggtctgctacatcaaaggtgctcttattgcctccagatgtttctgctttggccactcaagcagagatagagagcatagttaaacccaaagttcttgtgaaagaagctgagaaaaaacttccttccgatacagaaaaagaggacagatcaccatctgctatattttcagcagagctgagtaaaacttcagttgttgacctcctgtactggagagacattaagaagactggagtggtgtttggtgccagcctattcctgctgctttcattgacagtattcagcattgtgagcgtaacagcctacattgccttggccctgctctctgtgaccatcagctttaggatatacaagggtgtgatccaagctatccagaaatcagatgaaggccacccattcagggcatatctggaatctgaagttgctatatctgaggagttggttcagaagtacagtaattctgctcttggtcatgtgaactgcacgataaaggaactcaggcgcctcttcttagttgatgatttagttgattctctgaagtttgcagtgttgatgtgggtatttacctatgttggtgccttgtttaatggtctgacactactgattttggctctcatttcactcttcagtgttcctgttatttatgaacggcatcaggcacagatagatcattatctaggacttgcaaataagaatgttaaagatgctatggctaaaatccaagcaaaaatccctggattgaagcgcaaagctgaatgaaaacgcccaaaataattagtaggagttcatctttaaaggggatattcatttgattatacgggggagggtcagggaagaacgaaccttgacgttgcagtgcagtttcacagatcgttgttagatctttatttttagccatgcactgttgtgaggaaaaattacctgtcttgactgccatgtgttcatcatcttaagtattgtaagctgctatgtatggatttaaaccgtaatcatatctttttcctatctatctgaggcactggtggaataaaaaacctgtatattttactttgttgcagatagtcttgccgcatcttggcaagttgcagagatggtggagctagaaaaaaaaaaaaaaaagcccttttcagtttgtgcactgtgtatggtccgtgtagattgatgcagattttctgaaatgaaatgtttgtttagacgagatcataccggtaaagcaggaatgacaaagcttgcttttctggtatgttctaggtgtattgtgacttttactgttatattaattgccaatataagtaaatatagattatatatgtatagtgtttcacaaagcttagacctttaccttccagccaccccacagtgcttgatatttcagagtcagtcattggttatacatgtgtagttccaaagcacataagctagaagaagaaatatttctaggagcactaccatctgttttcaacatgaaatgccacacacatagaactccaacatcaatttcattgcacagactgactgtagttaattttgtcacagaatctatggactgaatctaatgcttccaaaaatgttgtttgtttgcaaatatcaaacattgttatgcaagaaattattaattacaaaatgaagatttataccattgtggtttaagctgtactgaactaaatctgtggaatgcattgtgaactgtaaaagcaaagtatcaataaagcttatagacttaaaa

SEQ ID NO: 1552 - protein, 986 aa, Homo sapiens
MDLKEQPGNTISAGQEDFPSVLLETAASLPSLSPLSAASFKEHEYLGNLSTVLPTEGTLQENVSEASKEVSEKAKTLLIDRDLTEFSELEYSEMGSSFSVSPKAESAVIVANPREEIIVKNKDEEEKLVSNNILHNQQELPTALTKLVKEDEVVSSEKAKDSFNEKRVAVEAPMREEYADFKPFERVWEVKDSKEDSDMLAAGGKIESNLESKVDKKCFADSLEQTNHEKDSESSNDDTSFPSTPEGIKDRSGAYITCAPFNPAATESIATNIFPLLGDPTSENKTDEKKIEEKKAQIVTEKNTSTKTSNPFLVAAQDSETDYVTTDNLTKVTEEVVANMPEGLTPDLVQEACESELNEVTGTKIAYETKMDLVQTSEVMQESLYPAAQLCPSFEESEATPSPVLPDIVMEAPLNSAVPSAGASVIQPSSSPLEASSVNYESIKHEPENPPPYEEAMSVSLKKVSGIKEEIKEPENINAALQETEAPYISIACDLIKETKLSAEPAPDFSDYSEMAKVEQPVPDHSELVEDSSPDSEPVDLFSDDSIPDVPQKQDETVMLVKESLTETSFESMIEYENKEKLSALPPEGGKPYLESFKLSLDNTKDTLLPDEVSTLSKKEKIPLQMEELSTAVYSNDDLFISKEAQIRETETFSDSSPIEIIDEFPTLISSKTDSFSKLAREYTDLEVSHKSEIANAPDGAGSLPCTELPHDLSLKNIQPKVEEKISFSDDFSKNGSATSKVLLLPPDVSALATQAEIESIVKPKVLVKEAEKKLPSDTEKEDRSPSAIFSAELSKTSVVDLLYWRDIKKTGVVFGASLFLLLSLTVFSIVSVTAYIALALLSVTISFRIYKGVIQAIQKSDEGHPFRAYLESEVAISEELVQKYSNSALGHVNCTIKELRRLFLVDDLVDSLKFAVLMWVFTYVGALFNGLTLLILALISLFSVPVIYERHQAQIDHYLGLANKNVKDAMAKIQAKIPGLKRKAE

SEQ ID NO: 1553 - DNA, 3783 bp, Homo sapiens
atggaagacctggaccagtctcctctggtctcgtcctcggacagcccaccccggccgcagcccgcgttcaagtaccagttcgtgagggagcccgaggacgaggaggaagaagaggaggaggaagaggaggacgaggacgaagacctggaggagctggagatagatttaacagagttttcagaattagaatactcagaaatgggatcatcgttcagtgtctctccaaaagcagaatctgccgtaatagtagcaaatcctagggaagaaataatcgtgaaaaataaagatgaagaagagaagttagttagtaataacatccttcataatcaacaagagttacctacagctcttactaaattggttaaagaggatgaagttgtgtcttcagaaaaagcaaaagacagttttaatgaaaagagagttgcagtggaagctcctatgagggaggaatatgcagacttcaaaccatttgagcgagtatgggaagtgaaagatagtaaggaagatagtgatatgttggctgctggaggtaaaatcgagagcaacttggaaagtaaagtggataaaaaatgttttgcagatagccttgagcaaactaatcacgaaaaagatagtgagagtagtaatgatgatacttctttccccagtacgccagaaggtataaaggatcgttcaggagcatatatcacatgtgctccctttaacccagcagcaactgagagcattgcaacaaacatttttcctttgttaggagatcctacttcagaaaataagaccgatgaaaaaaaaatagaagaaaagaaggcccaaatagtaacagagaagaatactagcaccaaaacatcaaacccttttcttgtagcagcacaggattctgagacagattatgtcacaacagataatttaacaaaggtgactgaggaagtcgtggcaaacatgcctgaaggcctgactccagatttagtacaggaagcatgtgaaagtgaattgaatgaagttactggtacaaagattgcttatgaaacaaaaatggacttggttcaaacatcagaagttatgcaagagtcactctatcctgcagcacagctttgcccatcatttgaagagtcagaagctactccttcaccagttttgcctgacattgttatggaagcaccattgaattctgcagttcctagtgctggtgcttccgtgatacagcccagctcatcaccattagaagcttcttcagttaattatgaaagcataaaacatgagcctgaaaaccccccaccatatgaagaggccatgagtgtatcactaaaaaaagtatcaggaataaaggaagaaattaaagagcctgaaaatattaatgcagctcttcaagaaacagaagctccttatatatctattgcatgtgatttaattaaagaaacaaagctttctgctgaaccagctccggatttctctgattattcagaaatggcaaaagttgaacagccagtgcctgatcattctgagctagttgaagattcctcacctgattctgaaccagttgacttatttagtgatgattcaatacctgacgttccacaaaaacaagatgaaactgtgatgcttgtgaaagaaagtctcactgagacttcatttgagtcaatgatagaatatgaaaataaggaaaaactcagtgctttgccacctgagggaggaaagccatatttggaatcttttaagctcagtttagataacacaaaagataccctgttacctgatgaagtttcaacattgagcaaaaaggagaaaattcctttgcagatggaggagctcagtactgcagtttattcaaatgatgacttatttatttctaaggaagcacagataagagaaactgaaacgttttcagattcatctccaattgaaattatagatgagttccctacattgatcagttctaaaactgattcattttctaaattagccagggaatatactgacctagaagtatcccacaaaagtgaaattgctaatgccccggatggagctgggtcattgccttgcacagaattgccccatgacctttctttgaagaacatacaacccaaagttgaagagaaaatcagtttctcagatgacttttctaaaaatgggtctgctacatcaaaggtgctcttattgcctccagatgtttctgctttggccactcaagcagagatagagagcatagttaaacccaaagttcttgtgaaagaagctgagaaaaaacttccttccgatacagaaaaagaggacagatcaccatctgctatattttcagcagagctgagtaaaacttcagttgttgacctcctgtactggagagacattaagaagactggagtggtgtttggtgccagcctattcctgctgctttcattgacagtattcagcattgtgagcgtaacagcctacattgccttggccctgctctctgtgaccatcagctttaggatatacaagggtgtgatccaagctatccagaaatcagatgaaggccacccattcagggcatatctggaatctgaagttgctatatctgaggagttggttcagaagtacagtaattctgctcttggtcatgtgaactgcacgataaaggaactcaggcgcctcttcttagttgatgatttagttgattctctgaagtttgcagtgttgatgtgggtatttacctatgttggtgccttgtttaatggtctgacactactgattttggctctcatttcactcttcagtgttcctgttatttatgaacggcatcaggcacagatagatcattatctaggacttgcaaataagaatgttaaagatgctatggctaaaatccaagcaaaaatccctggattgaagcgcaaagctgaatgaaaacgcccaaaataattagtaggagttcatctttaaaggggatattcatttgattatacggatctttatttttagccatgcactgttgtgaggaaaaattacctgtcttgactgccatgtgttcatcatcttaagtattgtaagctgctatgtatggatttaaaccgtaatcatatctttttcctatctatctgaggcactggtggaataaaaaacctgtatattttactttgttgcagatagtcttgccgcatcttggcaagttgcagagatggtggagctagaaaaaaaaaaaaaaaagcccttttcagtttgtgcactgtgtatggtccgtgtagattgatgcagattttctgaaatgaaatgtttgtttagacgagatcataccggtaaagcaggaatgacaaagcttgcttttctggtatgttctaggtgtattgtgacttttactgttatattaattgccaatataagtaaatatagattatatatgtatagtgtttcacaaagcttagacctttaccttccagccaccccacagtgcttgatatttcagagtcagtcattggttatacatgtgtagttccaaagcacataagctagaagaagaaatatttctaggagcactaccatctgttttcaacatgaaatgccacacacatagaactccaacatcaatttcattgcacagactgactgtagttaattttgtcacagaatctatggactgaatctaatgcttccaaaaatgttgtttgtttgcaaatatcaaacattgttatgcaagaaattattaattacaaaatgaagatttataccattgtggtttaagctgtactgaactaaatctgtggaatgcattgtgaactgtaaaagcaaagtatcaataaagcttatagactt

SEQ ID NO: 1554 - protein, 959 aa, Homo sapiens
MEDLDQSPLVSSSDSPPRPQPAFKYQFVREPEDEEEEEEEEEEDEDEDLEELEIDLTEFSELEYSEMGSSFSVSPKAESAVIVANPREEIIVKNKDEEEKLVSNNILHNQQELPTALTKLVKEDEVVSSEKAKDSFNEKRVAVEAPMREEYADFKPFERVWEVKDSKEDSDMLAAGGKIESNLESKVDKKCFADSLEQTNHEKDSESSNDDTSFPSTPEGIKDRSGAYITCAPFNPAATESIATNIFPLLGDPTSENKTDEKKIEEKKAQIVTEKNTSTKTSNPFLVAAQDSETDYVTTDNLTKVTEEVVANMPEGLTPDLVQEACESELNEVTGTKIAYETKMDLVQTSEVMQESLYPAAQLCPSFEESEATPSPVLPDIVMEAPLNSAVPSAGASVIQPSSSPLEASSVNYESIKHEPENPPPYEEAMSVSLKKVSGIKEEIKEPENINAALQETEAPYISIACDLIKETKLSAEPAPDFSDYSEMAKVEQPVPDHSELVEDSSPDSEPVDLFSDDSIPDVPQKQDETVMLVKESLTETSFESMIEYENKEKLSALPPEGGKPYLESFKLSLDNTKDTLLPDEVSTLSKKEKIPLQMEELSTAVYSNDDLFISKEAQIRETETFSDSSPIEIIDEFPTLISSKTDSFSKLAREYTDLEVSHKSEIANAPDGAGSLPCTELPHDLSLKNIQPKVEEKISFSDDFSKNGSATSKVLLLPPDVSALATQAEIESIVKPKVLVKEAEKKLPSDTEKEDRSPSAIFSAELSKTSVVDLLYWRDIKKTGVVFGASLFLLLSLTVFSIVSVTAYIALALLSVTISFRIYKGVIQAIQKSDEGHPFRAYLESEVAISEELVQKYSNSALGHVNCTIKELRRLFLVDDLVDSLKFAVLMWVFTYVGALFNGLTLLILALISLFSVPVIYERHQAQIDHYLGLANKNVKDAMAKIQAKIPGLKRKAE

SEQ ID NO: 1555 - DNA, 2383 bp, Homo sapiens
agtccctgccctcccctggggagggtgagtcacgccaaactgggcggagagtccgctggcctcactcctagctcatctgggcggcggcggcaagtggggacagggcgggtggcgcatcaccggcgcggaggcaggaggagcagtctcattgttccgggagccgtcaccacagtaggtccctcggctcagtcggcccagcccctctcagtcctccccaacccccacaaccgcccgcggctctgagacgcggccccggcggcggcggcagcagctgcagcatcatctccaccctccagccatggaagacctggaccagtctcctctggtctcgtcctcggacagcccaccccggccgcagcccgcgttcaagtaccagttcgtgagggagcccgaggacgaggaggaagaagaggaggaggaagaggaggacgaggacgaagacctggaggagctggaggtgctggagaggaagcccgccgccgggctgtccgcggccccagtgcccaccgcccctgccgccggcgcgcccctgatggacttcggaaatgacttcgtgccgccggcgccccggggacccctgccggccgctccccccgtcgccccggagcggcagccgtcttgggacccgagcccggtgtcgtcgaccgtgcccgcgccatccccgctgtctgctgccgcagtctcgccctccaagctccctgaggacgacgagcctccggcccggcctccccctcctcccccggccagcgtgagcccccaggcagagcccgtgtggaccccgccagccccggctcccgccgcgcccccctccaccccggccgcgcccaagcgcaggggctcctcgggctcagtggttgttgacctcctgtactggagagacattaagaagactggagtggtgtttggtgccagcctattcctgctgctttcattgacagtattcagcattgtgagcgtaacagcctacattgccttggccctgctctctgtgaccatcagctttaggatatacaagggtgtgatccaagctatccagaaatcagatgaaggccacccattcagggcatatctggaatctgaagttgctatatctgaggagttggttcagaagtacagtaattctgctcttggtcatgtgaactgcacgataaaggaactcaggcgcctcttcttagttgatgatttagttgattctctgaagtttgcagtgttgatgtgggtatttacctatgttggtgccttgtttaatggtctgacactactgattttggctctcatttcactcttcagtgttcctgttatttatgaacggcatcaggcacagatagatcattatctaggacttgcaaataagaatgttaaagatgctatggctaaaatccaagcaaaaatccctggattgaagcgcaaagctgaatgaaaacgcccaaaataattagtaggagttcatctttaaaggggatattcatttgattatacgggggagggtcagggaagaacgaaccttgacgttgcagtgcagtttcacagatcgttgttagatctttatttttagccatgcactgttgtgaggaaaaattacctgtcttgactgccatgtgttcatcatcttaagtattgtaagctgctatgtatggatttaaaccgtaatcatatctttttcctatctatctgaggcactggtggaataaaaaacctgtatattttactttgttgcagatagtcttgccgcatcttggcaagttgcagagatggtggagctagaaaaaaaaaaaaaaaagcccttttcagtttgtgcactgtgtatggtccgtgtagattgatgcagattttctgaaatgaaatgtttgtttagacgagatcataccggtaaagcaggaatgacaaagcttgcttttctggtatgttctaggtgtattgtgacttttactgttatattaattgccaatataagtaaatatagattatatatgtatagtgtttcacaaagcttagacctttaccttccagccaccccacagtgcttgatatttcagagtcagtcattggttatacatgtgtagttccaaagcacataagctagaagaagaaatatttctaggagcactaccatctgttttcaacatgaaatgccacacacatagaactccaacatcaatttcattgcacagactgactgtagttaattttgtcacagaatctatggactgaatctaatgcttccaaaaatgttgtttgtttgcaaatatcaaacattgttatgcaagaaattattaattacaaaatgaagatttataccattgtggtttaagctgtactgaactaaatctgtggaatgcattgtgaactgtaaaagcaaagtatcaataaagcttatagactt

SEQ ID NO: 1556 - protein, 373 aa, Homo sapiens
MEDLDQSPLVSSSDSPPRPQPAFKYQFVREPEDEEEEEEEEEEDEDEDLEELEVLERKPAAGLSAAPVPTAPAAGAPLMDFGNDFVPPAPRGPLPAAPPVAPERQPSWDPSPVSSTVPAPSPLSAAAVSPSKLPEDDEPPARPPPPPPASVSPQAEPVWTPPAPAPAAPPSTPAAPKRRGSSGSVVVDLLYWRDIKKTGVVFGASLFLLLSLTVFSIVSVTAYIALALLSVTISFRIYKGVIQAIQKSDEGHPFRAYLESEVAISEELVQKYSNSALGHVNCTIKELRRLFLVDDLVDSLKFAVLMWVFTYVGALFNGLTLLILALISLFSVPVIYERHQAQIDHYLGLANKNVKDAMAKIQAKIPGLKRKAE

SEQ ID NO: 1557 - DNA, 4837 bp, Homo sapiens
agtccctgccctcccctggggagggtgagtcacgccaaactgggcggagagtccgctggcctcactcctagctcatctgggcggcggcggcaagtggggacagggcgggtggcgcatcaccggcgcggaggcaggaggagcagtctcattgttccgggagccgtcaccacagtaggtccctcggctcagtcggcccagcccctctcagtcctccccaacccccacaaccgcccgcggctctgagacgcggccccggcggcggcggcagcagctgcagcatcatctccaccctccagccatggaagacctggaccagtctcctctggtctcgtcctcggacagcccaccccggccgcagcccgcgttcaagtaccagttcgtgagggagcccgaggacgaggaggaagaagaggaggaggaagaggaggacgaggacgaagacctggaggagctggaggtgctggagaggaagcccgccgccgggctgtccgcggccccagtgcccaccgcccctgccgccggcgcgcccctgatggacttcggaaatgacttcgtgccgccggcgccccggggacccctgccggccgctccccccgtcgccccggagcggcagccgtcttgggacccgagcccggtgtcgtcgaccgtgcccgcgccatccccgctgtctgctgccgcagtctcgccctccaagctccctgaggacgacgagcctccggcccggcctccccctcctcccccggccagcgtgagcccccaggcagagcccgtgtggaccccgccagccccggctcccgccgcgcccccctccaccccggccgcgcccaagcgcaggggctcctcgggctcagtggatgagaccctttttgctcttcctgctgcatctgagcctgtgatacgctcctctgcaaatatggacttgaaggagcagccaggtaacactatttcggctggtcaagaggatttcccatctgtcctgcttgaaactgctgcttctcttccttctctgtctcctctctcagccgcttctttcaaagaacatgaataccttggtaatttgtcaacagtattacccactgaaggaacacttcaagaaaatgtcagtgaagcttctaaagaggtctcagagaaggcaaaaactctactcatagatagagatttaacagagttttcagaattagaatactcagaaatgggatcatcgttcagtgtctctccaaaagcagaatctgccgtaatagtagcaaatcctagggaagaaataatcgtgaaaaataaagatgaagaagagaagttagttagtaataacatccttcataatcaacaagagttacctacagctcttactaaattggttaaagaggatgaagttgtgtcttcagaaaaagcaaaagacagttttaatgaaaagagagttgcagtggaagctcctatgagggaggaatatgcagacttcaaaccatttgagcgagtatgggaagtgaaagatagtaaggaagatagtgatatgttggctgctggaggtaaaatcgagagcaacttggaaagtaaagtggataaaaaatgttttgcagatagccttgagcaaactaatcacgaaaaagatagtgagagtagtaatgatgatacttctttccccagtacgccagaaggtataaaggatcgttcaggagcatatatcacatgtgctccctttaacccagcagcaactgagagcattgcaacaaacatttttcctttgttaggagatcctacttcagaaaataagaccgatgaaaaaaaaatagaagaaaagaaggcccaaatagtaacagagaagaatactagcaccaaaacatcaaacccttttcttgtagcagcacaggattctgagacagattatgtcacaacagataatttaacaaaggtgactgaggaagtcgtggcaaacatgcctgaaggcctgactccagatttagtacaggaagcatgtgaaagtgaattgaatgaagttactggtacaaagattgcttatgaaacaaaaatggacttggttcaaacatcagaagttatgcaagagtcactctatcctgcagcacagctttgcccatcatttgaagagtcagaagctactccttcaccagttttgcctgacattgttatggaagcaccattgaattctgcagttcctagtgctggtgcttccgtgatacagcccagctcatcaccattagaagcttcttcagttaattatgaaagcataaaacatgagcctgaaaaccccccaccatatgaagaggccatgagtgtatcactaaaaaaagtatcaggaataaaggaagaaattaaagagcctgaaaatattaatgcagctcttcaagaaacagaagctccttatatatctattgcatgtgatttaattaaagaaacaaagctttctgctgaaccagctccggatttctctgattattcagaaatggcaaaagttgaacagccagtgcctgatcattctgagctagttgaagattcctcacctgattctgaaccagttgacttatttagtgatgattcaatacctgacgttccacaaaaacaagatgaaactgtgatgcttgtgaaagaaagtctcactgagacttcatttgagtcaatgatagaatatgaaaataaggaaaaactcagtgctttgccacctgagggaggaaagccatatttggaatcttttaagctcagtttagataacacaaaagataccctgttacctgatgaagtttcaacattgagcaaaaaggagaaaattcctttgcagatggaggagctcagtactgcagtttattcaaatgatgacttatttatttctaaggaagcacagataagagaaactgaaacgttttcagattcatctccaattgaaattatagatgagttccctacattgatcagttctaaaactgattcattttctaaattagccagggaatatactgacctagaagtatcccacaaaagtgaaattgctaatgccccggatggagctgggtcattgccttgcacagaattgccccatgacctttctttgaagaacatacaacccaaagttgaagagaaaatcagtttctcagatgacttttctaaaaatgggtctgctacatcaaaggtgctcttattgcctccagatgtttctgctttggccactcaagcagagatagagagcatagttaaacccaaagttcttgtgaaagaagctgagaaaaaacttccttccgatacagaaaaagaggacagatcaccatctgctatattttcagcagagctgagtaaaacttcagttgttgacctcctgtactggagagacattaagaagactggagtggtgtttggtgccagcctattcctgctgctttcattgacagtattcagcattgtgagcgtaacagcctacattgccttggccctgctctctgtgaccatcagctttaggatatacaagggtgtgatccaagctatccagaaatcagatgaaggccacccattcagggcatatctggaatctgaagttgctatatctgaggagttggttcagaagtacagtaattctgctcttggtcatgtgaactgcacgataaaggaactcaggcgcctcttcttagttgatgatttagttgattctctgaagtttgcagtgttgatgtgggtatttacctatgttggtgccttgtttaatggtctgacactactgattttggctctcatttcactcttcagtgttcctgttatttatgaacggcatcaggcacagatagatcattatctaggacttgcaaataagaatgttaaagatgctatggctaaaatccaagcaaaaatccctggattgaagcgcaaagctgaatgaaaacgcccaaaataattagtaggagttcatctttaaaggggatattcatttgattatacgggggagggtcagggaagaacgaaccttgacgttgcagtgcagtttcacagatcgttgttagatctttatttttagccatgcactgttgtgaggaaaaattacctgtcttgactgccatgtgttcatcatcttaagtattgtaagctgctatgtatggatttaaaccgtaatcatatctttttcctatctatctgaggcactggtggaataaaaaacctgtatattttactttgttgcagatagtcttgccgcatcttggcaagttgcagagatggtggagctagaaaaaaaaaaaaaaaagcccttttcagtttgtgcactgtgtatggtccgtgtagattgatgcagattttctgaaatgaaatgtttgtttagacgagatcataccggtaaagcaggaatgacaaagcttgcttttctggtatgttctaggtgtattgtgacttttactgttatattaattgccaatataagtaaatatagattatatatgtatagtgtttcacaaagcttagacctttaccttccagccaccccacagtgcttgatatttcagagtcagtcattggttatacatgtgtagttccaaagcacataagctagaagaagaaatatttctaggagcactaccatctgttttcaacatgaaatgccacacacatagaactccaacatcaatttcattgcacagactgactgtagttaattttgtcacagaatctatggactgaatctaatgcttccaaaaatgttgtttgtttgcaaatatcaaacattgttatgcaagaaattattaattacaaaatgaagatttataccattgtggtttaagctgtactgaactaaatctgtggaatgcattgtgaactgtaaaagcaaagtatcaataaagcttatagactt

SEQ ID NO: 1558 - protein, 1191 aa, Homo sapiens
MEDLDQSPLVSSSDSPPRPQPAFKYQFVREPEDEEEEEEEEEEDEDEDLEELEVLERKPAAGLSAAPVPTAPAAGAPLMDFGNDFVPPAPRGPLPAAPPVAPERQPSWDPSPVSSTVPAPSPLSAAAVSPSKLPEDDEPPARPPPPPPASVSPQAEPVWTPPAPAPAAPPSTPAAPKRRGSSGSVDETLFALPAASEPVIRSSANMDLKEQPGNTISAGQEDFPSVLLETAASLPSLSPLSAASFKEHEYLGNLSTVLPTEGTLQENVSEASKEVSEKAKTLLIDRDLTEFSELEYSEMGSSFSVSPKAESAVIVANPREEIIVKNKDEEEKLVSNNILHNQQELPTALTKLVKEDEVVSSEKAKDSFNEKRVAVEAPMREEYADFKPFERVWEVKDSKEDSDMLAAGGKIESNLESKVDKKCFADSLEQTNHEKDSESSNDDTSFPSTPEGIKDRSGAYITCAPFNPAATESIATNIFPLLGDPTSENKTDEKKIEEKKAQIVTEKNTSTKTSNPFLVAAQDSETDYVTTDNLTKVTEEVVANMPEGLTPDLVQEACESELNEVTGTKIAYETKMDLVQTSEVMQESLYPAAQLCPSFEESEATPSPVLPDIVMEAPLNSAVPSAGASVIQPSSSPLEASSVNYESIKHEPENPPPYEEAMSVSLKKVSGIKEEIKEPENINAALQETEAPYISIACDLIKETKLSAEPAPDFSDYSEMAKVEQPVPDHSELVEDSSPDSEPVDLFSDDSIPDVPQKQDETVMLVKESLTETSFESMIEYENKEKLSALPPEGGKPYLESFKLSLDNTKDTLLPDEVSTLSKKEKIPLQMEELSTAVYSNDDLFISKEAQIRETETFSDSSPIEIIDEFPTLISSKTDSFSKLAREYTDLEVSHKSEIANAPDGAGSLPCTELPHDLSLKNIQPKVEEKISFSDDFSKNGSATSKVLLLPPDVSALATQAEIESIVKPKVLVKEAEKKLPSDTEKEDRSPSAIFSAELSKTSVVDLLYWRDIKKTGVVFGASLFLLLSLTVFSIVSVTAYIALALLSVTISFRIYKGVIQAIQKSDEGHPFRAYLESEVAISEELVQKYSNSALGHVNCTIKELRRLFLVDDLVDSLKFAVLMWVFTYVGALFNGLTLLILALISLFSVPVIYERHQAQIDHYLGLANKNVKDAMAKIQAKIPGLKRKAE

SEQ ID NO: 1559 - DNA, 2437 bp, Homo sapiens
agtccctgccctcccctggggagggtgagtcacgccaaactgggcggagagtccgctggcctcactcctagctcatctgggcggcggcggcaagtggggacagggcgggtggcgcatcaccggcgcggaggcaggaggagcagtctcattgttccgggagccgtcaccacagtaggtccctcggctcagtcggcccagcccctctcagtcctccccaacccccacaaccgcccgcggctctgagacgcggccccggcggcggcggcagcagctgcagcatcatctccaccctccagccatggaagacctggaccagtctcctctggtctcgtcctcggacagcccaccccggccgcagcccgcgttcaagtaccagttcgtgagggagcccgaggacgaggaggaagaagaggaggaggaagaggaggacgaggacgaagacctggaggagctggaggtgctggagaggaagcccgccgccgggctgtccgcggccccagtgcccaccgcccctgccgccggcgcgcccctgatggacttcggaaatgacttcgtgccgccggcgccccggggacccctgccggccgctccccccgtcgccccggagcggcagccgtcttgggacccgagcccggtgtcgtcgaccgtgcccgcgccatccccgctgtctgctgccgcagtctcgccctccaagctccctgaggacgacgagcctccggcccggcctccccctcctcccccggccagcgtgagcccccaggcagagcccgtgtggaccccgccagccccggctcccgccgcgcccccctccaccccggccgcgcccaagcgcaggggctcctcgggctcagtggatgagaccctttttgctcttcctgctgcatctgagcctgtgatacgctcctctgcagttgacctcctgtactggagagacattaagaagactggagtggtgtttggtgccagcctattcctgctgctttcattgacagtattcagcattgtgagcgtaacagcctacattgccttggccctgctctctgtgaccatcagctttaggatatacaagggtgtgatccaagctatccagaaatcagatgaaggccacccattcagggcatatctggaatctgaagttgctatatctgaggagttggttcagaagtacagtaattctgctcttggtcatgtgaactgcacgataaaggaactcaggcgcctcttcttagttgatgatttagttgattctctgaagtttgcagtgttgatgtgggtatttacctatgttggtgccttgtttaatggtctgacactactgattttggctctcatttcactcttcagtgttcctgttatttatgaacggcatcaggcacagatagatcattatctaggacttgcaaataagaatgttaaagatgctatggctaaaatccaagcaaaaatccctggattgaagcgcaaagctgaatgaaaacgcccaaaataattagtaggagttcatctttaaaggggatattcatttgattatacgggggagggtcagggaagaacgaaccttgacgttgcagtgcagtttcacagatcgttgttagatctttatttttagccatgcactgttgtgaggaaaaattacctgtcttgactgccatgtgttcatcatcttaagtattgtaagctgctatgtatggatttaaaccgtaatcatatctttttcctatctatctgaggcactggtggaataaaaaacctgtatattttactttgttgcagatagtcttgccgcatcttggcaagttgcagagatggtggagctagaaaaaaaaaaaaaaaagcccttttcagtttgtgcactgtgtatggtccgtgtagattgatgcagattttctgaaatgaaatgtttgtttagacgagatcataccggtaaagcaggaatgacaaagcttgcttttctggtatgttctaggtgtattgtgacttttactgttatattaattgccaatataagtaaatatagattatatatgtatagtgtttcacaaagcttagacctttaccttccagccaccccacagtgcttgatatttcagagtcagtcattggttatacatgtgtagttccaaagcacataagctagaagaagaaatatttctaggagcactaccatctgttttcaacatgaaatgccacacacatagaactccaacatcaatttcattgcacagactgactgtagttaattttgtcacagaatctatggactgaatctaatgcttccaaaaatgttgtttgtttgcaaatatcaaacattgttatgcaagaaattattaattacaaaatgaagatttataccattgtggtttaagctgtactgaactaaatctgtggaatgcattgtgaactgtaaaagcaaagtatcaataaagcttatagactt

SEQ ID NO: 1560 - protein, 391 aa, Homo sapiens
MEDLDQSPLVSSSDSPPRPQPAFKYQFVREPEDEEEEEEEEEEDEDEDLEELEVLERKPAAGLSAAPVPTAPAAGAPLMDFGNDFVPPAPRGPLPAAPPVAPERQPSWDPSPVSSTVPAPSPLSAAAVSPSKLPEDDEPPARPPPPPPASVSPQAEPVWTPPAPAPAAPPSTPAAPKRRGSSGSVDETLFALPAASEPVIRSSAVDLLYWRDIKKTGVVFGASLFLLLSLTVFSIVSVTAYIALALLSVTISFRIYKGVIQAIQKSDEGHPFRAYLESEVAISEELVQKYSNSALGHVNCTIKELRRLFLVDDLVDSLKFAVLMWVFTYVGALFNGLTLLILALISLFSVPVIYERHQAQIDHYLGLANKNVKDAMAKIQAKIPGLKRKAE

SEQ ID NO: 1561 - DNA, 15552 bp, Homo sapiens
atggcgacgagcggcggcgaagaggcggcggcagcggctccggcgccggggaccccggcaacgggggcggacacgaccccgggctgggaggtggctgtgcggcccctgctgtccgcgtcctactccgccttcgagatgaaggagttgccgcagctggtggcctcagtcatcgagagtgaatcagaaatcctgcaccatgagaagcagtacgagccattctactcatcttttgttgcactttccacacactatattacaacagtttgcagtctcattccccggaaccaacttcagtcagtggcagcagcctgtaaagttctaattgagttttctctcctgcgtctggagaatccagatgaggcttgtgctgtgtcccagaaacacttgattctcctaatcaagggcctgtgcactggctgtagccgactagatagaactgaaattatcacatttacagcaatgatgaaatccgccaagctgccccaaacagtgaagacactttcagacgtggaagatcagaaagagctggcctcaccagtaagccctgagttgaggcaaaaggaggtacagatgaattttttgaaccagctgacctcagtttttaaccctagaactgtagcatcacaacctatcagtacacagactctggtggaaggagaaaatgatgagcagtcatctacagatcaagcctcagctatcaaaaccaagaatgtgttcatagctcagaacgtggctagtcttcaagagcttggtggctcggagaagctactgcgtgtatgtttgaacctgccatatttcctacgctatatcaatcggttccaagatgcagttttagctaattccttcttcataatgcctgcaacagtagcagatgccactgctgttcgtaatggctttcattcattggtgattgatgtaactatggcattggataccctttctctacctgtgttggaacctctcaatccttctcgtctacaagatgtgacagtcctcagcctaagttgtctgtatgcaggtgtgagtgtggcaacgtgcatggccatcctccatgtgggtagtgcccagcaagtgcggacagggtccacgagctccaaagaagatgactatgaaagtgacgcagctacaattgtccagaaatgtctcgaaatctatgacatgattggacaagcaatcagcagttctcgccgggctggtggtgagcactatcagaatttccaattgctgggtgcttggtgcttgttaaacagccttttcctcatactgaacctcagtcctactgcgttggctgataaggggaaagagaaggacccactggctgccctccgagtcagagacatcctttctcgtactaaagagggagtgggctcccctaaactggggcctggaaaagggcatcagggatttggggtactctcagtaatattggcaaaccatgccatcaaactgctaacgtctctctttcaagacctacaagtggaggcccttcacaagggttgggagacagatggcccccctgcagccttgagcattatggcccagagcacctccatacagaggattcaacggctgattgactctgtcccactgatgaacctgctcttgacgttactttcaacttcctacagaaaggcatgtgtcctgcagcggcagaggaagggctccatgagcagcgatgccagcgcctccaccgactccaatacttactatgaggacgatttcagtagcacggaggaggacagcagccaagacgatgacagtgagcctattttggggcaatggtttgaggagactatttctcccagtaaagagaaagcagcacctccgcctcctcccccacctcctccactggaaagctctcctcgggttaaaagccccagtaagcaggcccctggtgagaagggcaacattctggcgagtcgcaaagatcctgagttgttcttaggtctggcttccaacattttgaacttcatcacctcttccatgctgaactctcggaacaattttatccgaaactatctgagtgtatctctttcagaacaccatatggccaccctagccagtatcatcaaggaggtggacaaagatggactcaagggttcatcagatgaagagtttgctgcagctctctatcacttcaaccactcactggtaacctctgaccttcagtcacctaacctgcagaacacactgttgcagcagctaggagtggctcctttttctgagggcccttggcccttgtacattcaccctcaaagcctctctgtgctttcacgcctcctgctcatctggcaacataaagccagtgctcaaggtgaccctgacgtcccagaatgccttaaagtttgggacaggtttttgtctacaatgaagcagaatgccctgcaaggtgtggtgcccagtgagacagaggatctgaatgtagaacacctgcagatgctcctcctcattttccacaatttcaccgagacaggccggcgggccatattgtcgctttttgtccagatcatccaggagttgagcgtcaacatggatgctcagatgcgcttcgtgccgcttatcttggctcgcctccttctcatctttgattatctgcttcatcagtactccaaagcccctgtgtatctatttgagcaggtacagcataacctgctaagtcctccctttgggtgggcaagtggatcccaggacagcaacagccgccgggcaaccactcctctctatcatggattcaaagaagtagaagaaaactggtctaagcatttctcatcagatgctgtcccacaccccagattctactgtgtcctgtccccagaagcctcagaggatgatttgaaccgacttgattctgtggcatgtgacgtccttttctccaagcttgtcaagtatgatgagctttatgctgcactgacagccctgcttgcagctgggtcccagcttgatacagttaggagaaaggaaaacaagaatgtaacagccttggaggcctgtgcccttcaatattacttcttgatactgtggaggatcctaggaattttaccaccatcaaagacttacattaaccagctatccatgaactcacctgagatgagcgaatgtgacatcttgcacactctgcgatggtcttctcggctccggatcagctcctatgtcaactggataaaggatcaccttatcaaacagggaatgaaggctgagcatgctagctcgcttctagaactggcatccaccactaagtgtagctcagtgaaatatgatgttgaaatagtagaggaatacttcgctcgacagatctcatccttctgtagtatcgactgtaccaccatcttgcagctgcatgaaattcccagtctgcagtccatctacacccttgatgccgcgatctcaaaggtccaggtctctttggatgagcatttttctaagatggctgctgagactgatcctcataagtcgtctgagattaccaagaacctacttccagccacgctgcaactcattgacacctatgcatcgttcaccagagcctatttgctgcaaaactttaatgaagagggaacaactgagaaaccttccaaggagaaactgcaaggctttgctgctgttttggctattggctctagcaggtgcaaggcaaatactctgggtccgacactggttcagaatttgccatcgtcagtgcagactgtgtgtgagtcctggaacaacatcaataccaatgaatttcccaatattggatcctggcgcaatgcctttgccaatgacaccatcccttcagagagttatattagtgcagtgcaggctgcacacctggggactctctgtagccaaagtctgcccctggctgcttccctgaagcataccctcctctcactggtcaggttgactggagatcttattgtttggtcagatgagatgaacccaccacaggtaattcggacactgctacctcttcttttggaatcaagcactgagagtgttgccgagatcagtagcaactccctggaacgcatcttgggccctgctgagtctgatgagttcttggctcgtgtttatgagaagctgatcactggttgttacaacattctggccaatcatgcagatcctaacagtggactggatgaatccatcctggaggaatgtctccagtacttggaaaagcagctggaaagtagccaggctcgtaaagctatggaggagtttttctctgacagtggagaacttgtacagatcatgatggcaacagccaatgagaacctctctgctaaattctgtaaccgagttttgaaattcttcaccaaactcttccagctgactgagaagagccctaacccgagcctgttgcatctctgtggctccctggcacaactggcctgtgtggaacctgtgcgcctgcaggcctggctcacccgcatgactacatcgcccccaaaagattctgatcagctggatgtaattcaggagaaccggcagctgctgcagttactgaccacatacattgttcgggaaaacagccaagttggggaaggtgtgtgtgctgttcttctgggcaccctgactcccatggcaacagagatgctggccaacggtgatgggactggcttccctgaacttatggttgtgatggccactctggccagtgcaggtcaaggtgctggtcaccttcagcttcataatgctgctgtggattggctgagcagatgcaagaaatacctgtcacagaagaatgtagttgaaaaactgaatgccaatgtaatgcatggaaagcatgtgatgatcttggagtgcacatgccatatcatgtcttacttggctgatgtcacgaatgccctgagccagagtaatggtcaaggcccaagtcatctctcagtggatggggaagagcgggccattgaagtagactcagactgggtggaggagttggcggtggaagaggaagattcccaggctgaggattcagatgaagattctctttgcaataaactctgcacttttacgatcacacagaaagaattcatgaaccagcattggtaccactgtcacacctgtaaaatggtggatggcgtgggtgtctgcacagtgtgtgctaaggtgtgccacaaggatcatgagatttcctatgccaagtatggatccttcttctgtgactgtggagccaaggaagatggcagctgtttggctctggtgaagagaactcctagcagtggcatgagctctaccatgaaggagtcggcatttcagagtgaacccaggatttcagagagtctagtgcgtcatgccagcacctcctcgccagctgacaaagccaaggttaccatcagtgatggaaaggttgctgacgaagagaagcccaagaagagcagcctctgccgcacagtagagggctgccgggaggaattacagaaccaggccaatttctccttcgctcctctcgtgttagacatgcttaatttccttatggatgccattcagaccaacttccagcaagcttcagccgtcgggagcagcagccgtgctcagcaagccctcagtgagctacacactgtggagaaggcagtggagatgacagaccagctgatggttcccaccttagggtcccaggaaggtgcctttgagaatgtgcggatgaattacagtggagaccagggccagaccatccggcagctgatcagtgctcatgtgctcaggcgggtggctatgtgtgtgctctcctctccccatgggcgccgccaacatttggctgtcagccatgagaagggcaagatcaccgttctgcagctctctgcactcctgaagcaagcagattccagcaaaaggaagttaactctgacccgcttggcttctgccccagttccttttactgtgttgagcctcacaggaaatccctgcaaggaagactacttggcggtttgtgggctaaaggactgtcatgtgctcacctttagtagctcaggctctgtttcggatcacttggttttgcaccctcagttggcaacggggaacttcatcatcaaagccgtgtggttacctggttcacagaccgagttagcaattgtcaccgcagactttgttaagatttatgacctgtgtgttgatgccttgagtccaaccttctattttctcctgccaagctcaaagataagagatgttaccttccttttcaatgaggagggaaagaacatcattgttataatgtcttcggctgggtacatctatactcagcttatggaagaggccagcagtgcccagcagggacccttctatgtcactaatgtgttggaaatcaatcatgaggacctgaaggacagtaacagccaggtggcgggcggtggtgtgtccgtgtactactcccacgtgttgcagatgttgttcttcagctattgtcaaggcaaatcattcgcagccaccatcagcaggacaaccctggaggtgttgcaactcttccccatcaacatcaaaagttccaatggtggcagtaagacttctcctgctctttgccagtggtctgaggtgatgaaccaccctggcttggtgtgctgtgtccagcaaactacaggggtgccgctggtagttatggtgaaaccagacacttttcttatccaggagattaagactcttcctgctaaagcgaagatccaagacatggttgctattaggcacacggcctgcaatgagcagcagcggacaacaatgattctgctgtgtgaggatggcagcctgcgcatttacatggccaacgtggagaacacctcctactggctgcagccatccctgcagcccagcagtgtcatcagcatcatgaagcctgttcgaaagcgcaaaacagctacaatcacaacccgcacgtctagccaggtgactttccccattgacttttttgaacacaaccagcagctgacagatgtggagtttggtggtaacgacctcctacaggtctataatgcacaacagataaaacaccggctgaattccactggcatgtatgtggccaacaccaagcccggaggcttcaccattgagattagtaacaacaatagcactatggtgatgacaggcatgcggatccagattgggactcaagcaatagaacgggccccgtcatatatcgagatcttcggcagaactatgcagctcaacctgagtcgctcacgctggtttgacttccccttcaccagagaagaagccctgcaggctgataagaagctgaacctcttcattggggcctcggtggatccagcaggtgtcaccatgatagatgctgtaaaaatttatggcaagactaaggagcagtttggctggcctgatgagcccccagaagaattcccttctgcctctgtcagcaacatctgcccttcaaatctgaaccagagcaacggcactggagatagcgactcagctgcccccactacgaccagtggaactgtcctggagaggctggttgtgagttctttagaagccctggaaagctgctttgccgttggcccaatcatcgagaaggagagaaacaagaatgctgctcaggagctggccactttgctgttgtccctgccagcacctgccagtgtccagcagcagtccaagagccttctggccagcctgcacaccagccgctcggcctaccacagccacaaggatcaggccttgctgagcaaagctgtgcagtgtctcaacacatctagcaaagagggcaaggatttggaccctgaggtgttccagaggctagtgatcacagctcgctccattgccatcatgcgccccaacaaccttgtccactttacggagtcaaagctgccccagatggaaacagaaggaatggatgaagggaaggaaccgcagaagcagttggaaggagattgctgtagtttcatcacccagcttgtgaaccacttctggaaactccatgcatccaaacccaagaatgccttcttggcacctgcctgccttccaggactaactcatattgaagctactgtcaatgctctggtggacatcatccatggctactgtacctgtgagctggattgtattaacacagcatccaagatctacatgcagatgctcttgtgtcctgatcctgctgtgagcttctcttgtaaacaagctctaattcgagtcctaaggcccaggaacaaacggagacatgtgactttaccctcttcccctcgaagcaacactccaatgggagacaaggatgatgatgacgatgatgatgcagatgagaaaatgcagtcatcagggatcccgaatggtggtcacatccgtcaggaaagccaggaacagagtgaggtggaccatggagattttgagatggtgtctgagtcgatggtcctggagacagctgaaaatgtcaacaatggcaacccctctcccctggaggccctgctggcaggcgcagagggcttcccccccatgctggacatcccacctgatgcagatgacgagaccatggttgaactagccattgccctgagcctgcagcaggaccaacaaggcagcagcagcagtgccctgggcctgcagagcctgggactgtccggccaggcacccagctcttcctctctggacgcaggaaccctctctgacaccacagcatcagctccagcctcagacgacgagggcagtacagcagcgacagatggttctacccttcggacctctcctgctgaccacggtggtagtgtgggctcggagagcgggggcagtgcagtggactcagtggctggcgagcacagtgtatctggccggagcagtgcttatggcgatgctacagctgaggggcatccggctggaccaggaagtgtcagctcaagcactggagccatcagcaccaccactgggcaccaggagggagatggctccgagggagaaggagaaggagaaactgaaggagatgtccacactagcaacaggctgcacatggtccgtctaatgctgttggagagattactgcagaccctgcctcaattacgaaacgttggcggtgtccgggccatcccatacatgcaggtcattctaatgctcactacagatctggatggagaagatgagaaagacaagggggccctagacaacctgctctcccagcttattgctgagttgggtatggataaaaaggatgtctccaagaagaatgagcgcagcgccctgaatgaagtccatctggtagtaatgagactcctgagtgtcttcatgtcccgcaccaaatctggatccaagtcttccatatgtgagtcatcttccctcatctccagtgccacagcagcagctctactgagctctggggctgtggactactgcctgcacgtgctcaaatcactgctggaatattggaagagccaacagaatgacgaggagcctgtggctaccagccagttgctgaaaccacatactacctcctccccacctgacatgagcccattctttctccgccagtatgtgaagggtcatgctgctgatgtgtttgaggcctatactcagcttctaacagaaatggtactgaggcttccttaccaaatcaaaaagattactgacaccaattctcgaatcccacctcctgtctttgaccactcgtggttttactttctctccgagtacctcatgatccagcagactccatttgtgcgccgtcaagtccgcaaacttctgctcttcatctgtggatccaaagagaagtaccgccagctccgggatttgcacaccctggactctcacgtgcgtgggatcaagaagctgctagaagagcaggggatattcctccgggcaagtgtggttacagccagctcaggctccgccttgcaatatgacacactcatcagcctgatggagcacctgaaagcctgtgcagagattgccgcccagcgaaccatcaactggcagaaattctgcatcaaagatgactccgtcctgtacttcctcctccaagtcagtttccttgtggatgagggcgtgtccccagtgctgctgcaactgctctcctgtgctctgtgcggcagcaaggtgctcgctgcactggcagcctcttcgggatcctccagtgcttcttcctcctcagcccctgtggctgccagttctggacaagccacaacacagtccaagtcttccactaaaaagagcaagaaagaagaaaaagaaaaggagaaagatggtgagacctctggcagccaggaggaccagctgtgcacagctctggtgaaccagctgaacaaatttgccgataaggaaaccctgatccagttcctgcgttgtttcctgttagagtccaattcttcctcggtgcgctggcaggcccactgtctgacactgcacatctacagaaattccagcaaatctcaacaggagctcctgctagatctgatgtggtccatctggccagaactcccagcctatggtcgtaaggctgcccagtttgtggacctactaggatatttctccctgaaaactccacaaacagagaagaagttgaaggagtattcacagaaggctgtggagattctgcggactcaaaaccatattcttaccaaccaccccaactcgaacatttataacactttgtctggcttagtggagtttgatggctattacctggagagcgatccctgcctggtgtgtaataacccggaagtaccgttctgttatatcaagctgtcttccattaaagtggacacgcggtacaccaccacccagcaggttgtgaagctcattggcagtcacaccatcagcaaagtgacagtgaaaatcggggatctgaaacggaccaagatggtgcggaccatcaacctgtattataacaaccgaaccgtgcaggccatcgtggagttgaaaaacaagccagctcgctggcacaaagccaagaaggttcagctgacccctggacagacagaggtgaagattgacctgccgttgcccattgtggcctccaatctgatgattgagtttgcagacttctatgaaaactaccaggcctccacagagaccctgcagtgccctcgctgtagtgcctcggtccctgccaacccaggagtctgtggcaactgtggagagaatgtgtaccagtgtcacaaatgcagatccatcaactacgatgaaaaggatcccttcctctgcaatgcctgtggcttctgtaaatatgcccgcttcgacttcatgctctatgccaagccttgctgtgcagtggatcccattgagaatgaagaagaccggaagaaggctgtatccaacatcaatacacttttggacaaagctgatcgagtgtatcatcagctgatgggacaccggccacagctggagaacctgctctgcaaagtgaatgaggcagctccagaaaagccacaggatgactcaggaacagcagggggcatcagctccacttctgccagtgtgaatcgttacatcctgcagttggctcaggagtattgtggagactgcaagaactcttttgatgaactctccaaaatcatccagaaagtctttgcttcgcgcaaagagttgttggaatatgacctacagcagagggaagcagccactaaatcatcccggacctccgtgcagcccacattcactgccagccagtaccgtgccttatccgtcctgggctgtggccacacatcctccaccaagtgctatggctgcgcctcggctgtcacagaacattgtatcacactacttcgggccctggccaccaacccagccttgaggcacatccttgtctcccagggccttatccgggagctctttgattataatcttcgccgaggggctgcggccatgcgggaggaggtccgccagctcatgtgcctcctaactcgagacaacccagaagccacccaacagatgaatgacctgattattggcaaggtctccacagccctgaagggccactgggccaaccccgatctggcaagtagcctgcagtatgaaatgctgctgctgacggattctatctccaaggaggacagctgctgggagctccggttacgctgtgctctcagccttttcctcatggctgtgaacattaagactcctgtggtggttgaaaacattaccctcatgtgcctgaggatcttgcagaagctgataaaaccacctgctcccactagcaagaagaacaaggatgtccccgttgaggccctcaccacggtgaagccatactgcaatgagatccatgcccaggctcaactgtggctcaagagagaccccaaggcatcctatgatgcctggaagaagtgtcttcctatcagagggatagatggcaatgggaaagcccccagcaaatcagagctccgccatctctatttgactgagaagtatgtgtggaggtggaaacagttcctgagtcgtcgggggaagaggacctcccccttggatctcaaactggggcataacaactggctgcgacaagtgcttttcactccagcaacgcaggccgcacggcaggcagcctgtaccattgtggaagctctagccaccattcccagccgcaagcagcaggtcctggacctgcttaccagttacctggatgagctgagcatagctggggagtgtgcagctgagtacctggctctctaccagaagctcatcacttctgcgcactggaaagtctacttggcagctcggggagtcctaccctatgtgggcaacctcatcaccaaggaaatagctcgtctgctggccctggaggaggctaccctgagtaccgatctgcagcagggttatgcccttaaaagtctcacaggccttctctcctcctttgttgaggtggaatccatcaaaagacattttaaaagtcgcttggtgggtactgtgctgaatggatacctgtgcttgcggaagctggtggtgcagaggaccaagctgatcgatgagacgcaggacatgctgctggagatgctggaggacatgaccacaggtacagaatcagaaaccaaggccttcatggctgtgtgcattgagacagccaagcgctacaatctggatgactaccggaccccggtgttcatcttcgagaggctctgcagcatcatttatcctgaggagaatgaagtcactgagttctttgtgaccctggagaaggatccccaacaagaagacttcttacagggcaggatgcctgggaacccgtatagcagcaatgagccaggcatcgggccgctgatgagggatataaagaacaagatttgccaggactgtgacttagtggccctcctggaagatgacagtggcatggagcttctagtgaacaataaaatcattagtttggaccttcctgtggctgaagtttacaagaaagtctggtgtaccacgaatgagggagagcccatgaggattgtttatcgtatgcgggggctgctgggcgatgccacagaggagttcattgagtccctggactctactacagatgaagaagaagatgaagaagaagtgtataaaatggctggtgtgatggcccagtgtgggggcctggaatgcatgcttaacagactcgcagggatcagagatttcaagcagggacgccaccttctaacagtgctactgaaattgttcagttactgcgtgaaggtgaaagtcaaccggcagcaactggtcaaactggaaatgaacaccttgaacgtcatgctggggaccctaaacctggcccttgtagctgaacaagaaagcaaggacagtgggggtgcagctgtggctgagcaggtgcttagcatcatggagatcattctagatgagtccaatgctgagcccctgagtgaggacaagggcaacctcctcctgacaggtgacaaggatcaactggtgatgctcttggaccagatcaacagcacctttgttcgctccaaccccagtgtgctccagggcctgcttcgcatcatcccgtacctttcctttggagaggtggagaaaatgcagatcttggtggagcgattcaaaccatactgcaactttgataaatatgatgaagatcacagtggtgatgataaagtcttcctggactgcttctgtaaaatagctgctggcatcaagaacaacagcaatgggcaccagctgaaggatctgattctccagaaggggatcacccagaatgcacttgactacatgaaaaagcacatccctagcgccaagaatttggatgccgacatctggaaaaagtttttgtctcgcccagccttgccatttatcctaaggctgcttcggggcctggccatccagcaccctggcacccaggttctgattggaactgattccatcccgaacctgcataagctggagcaggtgtccagtgatgagggcattgggaccttggcagagaacctgctggaagccctgcgggaacaccctgacgtaaacaagaagattgacgcagcccgcagggagacccgggcagagaagaagcgcatggccatggcaatgaggcagaaggccctgggcaccctgggcatgacgacaaatgaaaagggccaggtcgtgaccaagacagcactcctgaagcagatggaagagctgatcgaggagcctggcctcacgtgctgcatctgcagggagggatacaagttccagcccacaaaggtcctgggcatttataccttcacgaagcgggtagccttggaggagatggagaataagccccggaaacagcagggctacagcaccgtgtcccacttcaacattgtgcactacgactgccatctggctgccgtcaggttggctcgaggccgggaagagtgggagagtgccgccctgcagaatgccaacaccaagtgcaacgggctccttccggtctggggacctcatgtccctgaatcagcttttgccacttgcttggcaagacacaacacttacctccaggaatgtacaggccagcgggagcccacgtatcagctcaacatccatgacatcaaactgctcttcctgcgcttcgccatggagcagtcgttcagcgcagacactggcgggggcggccgggagagcaacatccacctgatcccgtacatcattcacactgtgctttacgtcctgaacacaacccgagcaacttcccgagaagagaagaacctccaaggctttctggaacagcccaaggagaagtgggtggagagtgcctttgaagtggacgggccctactatttcacagtcttggcccttcacatcctgccccctgagcagtggagagccacacgtgtggaaatcttgcggaggctgttggtgacctcgcaggctcgggcagtggctccaggtggagccaccaggctgacagataaggcagtgaaggactattccgcttaccgttcttcccttctcttttgggccctcgtcgatctcatttacaacatgtttaagaaggtgcctaccagtaacacagagggaggctggtcctgctctctcgctgagtacatccgccacaacgacatgcccatctacgaagctgccgacaaagccctgaaaaccttccaggaggagttcatgccagtggagaccttctcagagttcctcgatgtggccggtcttttatcagaaatcaccgatccagagagcttcctgaaggacctgttgaactcagtcccctga

SEQ ID NO: 1562 - protein, 5183 aa, Homo sapiens
MATSGGEEAAAAAPAPGTPATGADTTPGWEVAVRPLLSASYSAFEMKELPQLVASVIESESEILHHEKQYEPFYSSFVALSTHYITTVCSLIPRNQLQSVAAACKVLIEFSLLRLENPDEACAVSQKHLILLIKGLCTGCSRLDRTEIITFTAMMKSAKLPQTVKTLSDVEDQKELASPVSPELRQKEVQMNFLNQLTSVFNPRTVASQPISTQTLVEGENDEQSSTDQASAIKTKNVFIAQNVASLQELGGSEKLLRVCLNLPYFLRYINRFQDAVLANSFFIMPATVADATAVRNGFHSLVIDVTMALDTLSLPVLEPLNPSRLQDVTVLSLSCLYAGVSVATCMAILHVGSAQQVRTGSTSSKEDDYESDAATIVQKCLEIYDMIGQAISSSRRAGGEHYQNFQLLGAWCLLNSLFLILNLSPTALADKGKEKDPLAALRVRDILSRTKEGVGSPKLGPGKGHQGFGVLSVILANHAIKLLTSLFQDLQVEALHKGWETDGPPAALSIMAQSTSIQRIQRLIDSVPLMNLLLTLLSTSYRKACVLQRQRKGSMSSDASASTDSNTYYEDDFSSTEEDSSQDDDSEPILGQWFEETISPSKEKAAPPPPPPPPPLESSPRVKSPSKQAPGEKGNILASRKDPELFLGLASNILNFITSSMLNSRNNFIRNYLSVSLSEHHMATLASIIKEVDKDGLKGSSDEEFAAALYHFNHSLVTSDLQSPNLQNTLLQQLGVAPFSEGPWPLYIHPQSLSVLSRLLLIWQHKASAQGDPDVPECLKVWDRFLSTMKQNALQGVVPSETEDLNVEHLQMLLLIFHNFTETGRRAILSLFVQIIQELSVNMDAQMRFVPLILARLLLIFDYLLHQYSKAPVYLFEQVQHNLLSPPFGWASGSQDSNSRRATTPLYHGFKEVEENWSKHFSSDAVPHPRFYCVLSPEASEDDLNRLDSVACDVLFSKLVKYDELYAALTALLAAGSQLDTVRRKENKNVTALEACALQYYFLILWRILGILPPSKTYINQLSMNSPEMSECDILHTLRWSSRLRISSYVNWIKDHLIKQGMKAEHASSLLELASTTKCSSVKYDVEIVEEYFARQISSFCSIDCTTILQLHEIPSLQSIYTLDAAISKVQVSLDEHFSKMAAETDPHKSSEITKNLLPATLQLIDTYASFTRAYLLQNFNEEGTTEKPSKEKLQGFAAVLAIGSSRCKANTLGPTLVQNLPSSVQTVCESWNNINTNEFPNIGSWRNAFANDTIPSESYISAVQAAHLGTLCSQSLPLAASLKHTLLSLVRLTGDLIVWSDEMNPPQVIRTLLPLLLESSTESVAEISSNSLERILGPAESDEFLARVYEKLITGCYNILANHADPNSGLDESILEECLQYLEKQLESSQARKAMEEFFSDSGELVQIMMATANENLSAKFCNRVLKFFTKLFQLTEKSPNPSLLHLCGSLAQLACVEPVRLQAWLTRMTTSPPKDSDQLDVIQENRQLLQLLTTYIVRENSQVGEGVCAVLLGTLTPMATEMLANGDGTGFPELMVVMATLASAGQGAGHLQLHNAAVDWLSRCKKYLSQKNVVEKLNANVMHGKHVMILECTCHIMSYLADVTNALSQSNGQGPSHLSVDGEERAIEVDSDWVEELAVEEEDSQAEDSDEDSLCNKLCTFTITQKEFMNQHWYHCHTCKMVDGVGVCTVCAKVCHKDHEISYAKYGSFFCDCGAKEDGSCLALVKRTPSSGMSSTMKESAFQSEPRISESLVRHASTSSPADKAKVTISDGKVADEEKPKKSSLCRTVEGCREELQNQANFSFAPLVLDMLNFLMDAIQTNFQQASAVGSSSRAQQALSELHTVEKAVEMTDQLMVPTLGSQEGAFENVRMNYSGDQGQTIRQLISAHVLRRVAMCVLSSPHGRRQHLAVSHEKGKITVLQLSALLKQADSSKRKLTLTRLASAPVPFTVLSLTGNPCKEDYLAVCGLKDCHVLTFSSSGSVSDHLVLHPQLATGNFIIKAVWLPGSQTELAIVTADFVKIYDLCVDALSPTFYFLLPSSKIRDVTFLFNEEGKNIIVIMSSAGYIYTQLMEEASSAQQGPFYVTNVLEINHEDLKDSNSQVAGGGVSVYYSHVLQMLFFSYCQGKSFAATISRTTLEVLQLFPINIKSSNGGSKTSPALCQWSEVMNHPGLVCCVQQTTGVPLVVMVKPDTFLIQEIKTLPAKAKIQDMVAIRHTACNEQQRTTMILLCEDGSLRIYMANVENTSYWLQPSLQPSSVISIMKPVRKRKTATITTRTSSQVTFPIDFFEHNQQLTDVEFGGNDLLQVYNAQQIKHRLNSTGMYVANTKPGGFTIEISNNNSTMVMTGMRIQIGTQAIERAPSYIEIFGRTMQLNLSRSRWFDFPFTREEALQADKKLNLFIGASVDPAGVTMIDAVKIYGKTKEQFGWPDEPPEEFPSASVSNICPSNLNQSNGTGDSDSAAPTTTSGTVLERLVVSSLEALESCFAVGPIIEKERNKNAAQELATLLLSLPAPASVQQQSKSLLASLHTSRSAYHSHKDQALLSKAVQCLNTSSKEGKDLDPEVFQRLVITARSIAIMRPNNLVHFTESKLPQMETEGMDEGKEPQKQLEGDCCSFITQLVNHFWKLHASKPKNAFLAPACLPGLTHIEATVNALVDIIHGYCTCELDCINTASKIYMQMLLCPDPAVSFSCKQALIRVLRPRNKRRHVTLPSSPRSNTPMGDKDDDDDDDADEKMQSSGIPNGGHIRQESQEQSEVDHGDFEMVSESMVLETAENVNNGNPSPLEALLAGAEGFPPMLDIPPDADDETMVELAIALSLQQDQQGSSSSALGLQSLGLSGQAPSSSSLDAGTLSDTTASAPASDDEGSTAATDGSTLRTSPADHGGSVGSESGGSAVDSVAGEHSVSGRSSAYGDATAEGHPAGPGSVSSSTGAISTTTGHQEGDGSEGEGEGETEGDVHTSNRLHMVRLMLLERLLQTLPQLRNVGGVRAIPYMQVILMLTTDLDGEDEKDKGALDNLLSQLIAELGMDKKDVSKKNERSALNEVHLVVMRLLSVFMSRTKSGSKSSICESSSLISSATAAALLSSGAVDYCLHVLKSLLEYWKSQQNDEEPVATSQLLKPHTTSSPPDMSPFFLRQYVKGHAADVFEAYTQLLTEMVLRLPYQIKKITDTNSRIPPPVFDHSWFYFLSEYLMIQQTPFVRRQVRKLLLFICGSKEKYRQLRDLHTLDSHVRGIKKLLEEQGIFLRASVVTASSGSALQYDTLISLMEHLKACAEIAAQRTINWQKFCIKDDSVLYFLLQVSFLVDEGVSPVLLQLLSCALCGSKVLAALAASSGSSSASSSSAPVAASSGQATTQSKSSTKKSKKEEKEKEKDGETSGSQEDQLCTALVNQLNKFADKETLIQFLRCFLLESNSSSVRWQAHCLTLHIYRNSSKSQQELLLDLMWSIWPELPAYGRKAAQFVDLLGYFSLKTPQTEKKLKEYSQKAVEILRTQNHILTNHPNSNIYNTLSGLVEFDGYYLESDPCLVCNNPEVPFCYIKLSSIKVDTRYTTTQQVVKLIGSHTISKVTVKIGDLKRTKMVRTINLYYNNRTVQAIVELKNKPARWHKAKKVQLTPGQTEVKIDLPLPIVASNLMIEFADFYENYQASTETLQCPRCSASVPANPGVCGNCGENVYQCHKCRSINYDEKDPFLCNACGFCKYARFDFMLYAKPCCAVDPIENEEDRKKAVSNINTLLDKADRVYHQLMGHRPQLENLLCKVNEAAPEKPQDDSGTAGGISSTSASVNRYILQLAQEYCGDCKNSFDELSKIIQKVFASRKELLEYDLQQREAATKSSRTSVQPTFTASQYRALSVLGCGHTSSTKCYGCASAVTEHCITLLRALATNPALRHILVSQGLIRELFDYNLRRGAAAMREEVRQLMCLLTRDNPEATQQMNDLIIGKVSTALKGHWANPDLASSLQYEMLLLTDSISKEDSCWELRLRCALSLFLMAVNIKTPVVVENITLMCLRILQKLIKPPAPTSKKNKDVPVEALTTVKPYCNEIHAQAQLWLKRDPKASYDAWKKCLPIRGIDGNGKAPSKSELRHLYLTEKYVWRWKQFLSRRGKRTSPLDLKLGHNNWLRQVLFTPATQAARQAACTIVEALATIPSRKQQVLDLLTSYLDELSIAGECAAEYLALYQKLITSAHWKVYLAARGVLPYVGNLITKEIARLLALEEATLSTDLQQGYALKSLTGLLSSFVEVESIKRHFKSRLVGTVLNGYLCLRKLVVQRTKLIDETQDMLLEMLEDMTTGTESETKAFMAVCIETAKRYNLDDYRTPVFIFERLCSIIYPEENEVTEFFVTLEKDPQQEDFLQGRMPGNPYSSNEPGIGPLMRDIKNKICQDCDLVALLEDDSGMELLVNNKIISLDLPVAEVYKKVWCTTNEGEPMRIVYRMRGLLGDATEEFIESLDSTTDEEEDEEEVYKMAGVMAQCGGLECMLNRLAGIRDFKQGRHLLTVLLKLFSYCVKVKVNRQQLVKLEMNTLNVMLGTLNLALVAEQESKDSGGAAVAEQVLSIMEIILDESNAEPLSEDKGNLLLTGDKDQLVMLLDQINSTFVRSNPSVLQGLLRIIPYLSFGEVEKMQILVERFKPYCNFDKYDEDHSGDDKVFLDCFCKIAAGIKNNSNGHQLKDLILQKGITQNALDYMKKHIPSAKNLDADIWKKFLSRPALPFILRLLRGLAIQHPGTQVLIGTDSIPNLHKLEQVSSDEGIGTLAENLLEALREHPDVNKKIDAARRETRAEKKRMAMAMRQKALGTLGMTTNEKGQVVTKTALLKQMEELIEEPGLTCCICREGYKFQPTKVLGIYTFTKRVALEEMENKPRKQQGYSTVSHFNIVHYDCHLAAVRLARGREEWESAALQNANTKCNGLLPVWGPHVPESAFATCLARHNTYLQECTGQREPTYQLNIHDIKLLFLRFAMEQSFSADTGGGGRESNIHLIPYIIHTVLYVLNTTRATSREEKNLQGFLEQPKEKWVESAFEVDGPYYFTVLALHILPPEQWRATRVEILRRLLVTSQARAVAPGGATRLTDKAVKDYSAYRSSLLFWALVDLIYNMFKKVPTSNTEGGWSCSLAEYIRHNDMPIYEAADKALKTFQEEFMPVETFSEFLDVAGLLSEITDPESFLKDLLNSVP

SEQ ID NO: 1563 - DNA, 1431 bp, Homo sapiens
accccgtctcggccatgggcgagcaccccagcccgggccccgcggtggccgcctgcgccgaggcggagcgcatcgaggagctggaacccgaggccgaggagcggctgcccgcggcgccggaggaccactggaaagtcctgtttgatcagtttgaccctgggaacacaggctacattagcacaggcaagttccggagtcttctggagagccacagctccaagctggacccgcacaaaagggaggtcctcctggctcttgccgacagccacgcggatgggcagatcggctaccaggattttgtcagcctaatgagcaacaagcgttccaacagcttccgccaagccatcctgcagggcaaccgcaggctaagcagcaaggccctgctggaggagaaggggctgagcctctcgcagcgacttatccgccatgtggcctatgagaccctgccccgggaaattgaccgcaagtggtactatgacagctacacctgctgccccccaccctggttcatgatcacagtcacgctgctggaggcaaggacaagggttgcctttttcctctacaatggggtgtcactaggtcaatttgtactgcaggtaactcatccacgttacttgaagaactccctggtttaccacccacagctgcgagcacaggtttggcgctacctgacatacatcttcatgcatgcagggatagaacacctgggactcaatgtggtgctgcagctgctggtgggggtgcccctggagatggtgcatggagccacccgaattgggcttgtctacgtggccggtgttgtggcagggtccttggcagtgtctgtggctgacatgaccgctccagtcgtgggctcttctggaggggtgtatgctctcgtctctgcccatctggccaacattgtcatgaactggtcaggcatgaagtgccagttcaagctgctgcggatggctgtggcccttatctgtatgagcatggagtttgggcgggccgtgtggctccgcttccacccgtcggcctatcccccgtgccctcacccaagctttgtggcgcacttgggtggcgtggccgtgggcatcaccctgggcgtggtggtcctgaggaactacgagcagaggctccaggaccagtcactgtggtggatttttgtggccatgtacaccgtcttcgtgctgttcgctgtcttctggaacatctttgcctacaccctgctggacttaaagctgccgcctcccccctgagggctggaggcccaaggtcggggaggggagggaaaagcagcacccacagggagcgcctgcgaggtttcttctcatcaccagctcagctaggccgggcagacaaggacagaagactctgggccactgtaatgtttgtgtttagatttggacacacagtggagacccttttctgaaaggcatctggcggagg

SEQ ID NO: 1564 - protein, 408 aa, Homo sapiens [sequence omitted]

SEQ ID NO: 1565 - DNA, 3754 bp, Homo sapiens
cgcggcccaggtggtgcgggcggccctagcccggctgcggagcgctgcgcgagcggcgggctggctgaccccgagggacccccagcgcagcgggtgcggcgatgatcctggaggagaggccggacggcgcgggcgccggcgaggagagcccgcggctgcagggctgtgactccctgacgcagatccagtgcggccagctgcagagccgcagggcccagattcaccagcagattgacaaggagctgcagatgcggacgggcgctgagaacctctacagagccaccagcaacaaccgggtgagagagacggtcgccctggagctgagctacgtcaactccaacctgcagctgctgaaggaggagctggaggagctcagcggtggcgtggaccctggccggcatgggagcgaagctgtcactgtccccatgatccccctgggcctgaaggagaccaaggagctggactggtctacaccgctgaaggagctgatctcagtgcactttggagaggacggcgcctcctacgaggcagaaatcagggagctggaggccctgcggcaggccatgcggacccccagccggaatgagtcgggcctggagctgctcacagcctattacaaccagctgtgcttcctggatgcgcgcttcctcacccctgccaggagcctcgggctcttcttccactggtacgactcgcttactggggtcccggcccagcagcgtgccctggccttcgagaagggcagcgttctcttcaacatcggtgccctccacacgcagattggggcgcgccaggaccgctcctgcaccgagggtgcccgccgcgctatggaggccttccagagggccgctggggccttcagcctcctgagggagaacttctcccatgcgccgagcccagacatgagcgctgcgtccctctgcgcactggagcagctcatgatggcccaggcccaggaatgtgtgtttgagggcctctcaccacctgcctccatggccccccaagactgcctggcccagctgcgcctggcgcaggaggccgcccaggtggcagccgagtacaggctagtgcaccggaccatggcccagccacccgtccacgactacgtgcctgtctcctggactgccctggtgcatgtcaaggccgagtacttccgctccctggcccactaccacgtagccatggccctctgcgacggctcccgtgagtgcccaccacacttgcccatggtactgccaaggcccccccgcggctcacagcctctctgtcccccagcagcgaccgagggagagctccccacgcacgagcaggtcttcctgcagccccccacctcctctaagccccgaggccctgtgctgccgcaggagctggaggagcgcaggcagcttggcaaggcacacctgaagcgtgccatcctggggcaggaggaggcgctgcggctgcacgccctgtgccgcgtcctgcgcgaggtggacctgcttcgggctgtgatctcccagacgctgcagcgctcactggccaagtatgcggagctcgaccgtgaggatgacttctgtgaggctgccgaggccccggacatccagcctaagacccaccagaagccagaggccaggatgccacgcctgtcccaggggaaggggcctgacatcttccatcggctggggcccctgtctgtgttctcagccaagaaccggtggcggctggtggggcccgtccacctgacccgaggagagggcggctttggcctcacgcttcggggagactcgcctgtcctcatcgctgccgtcattccagggagccaggccgcggcggctggcctgaaggagggcgactacattgtgtcagtgaatgggcagccatgcaggtggtggagacacgcggaggtggtgacggagctgaaggctgcgggagaggcgggcgccagcctgcaggtggtgtcgctgctgcccagctctagactgcccagcttgggggaccgccggcccgtcctgctgggccccagggggcttctaaggagccagagggagcatggttgcaagaccccggcatccacgtgggccagtccccggcccctcctcaactggagccgaaaggcccagcagggcaagactggaggctgcccccagccctgtgccccagtgaagccagctccgccctcatccttgaagcacccagggtggccgtgagggccaggatccctgcacgcctcagccctggctccagctggcagcaagcaccgagcatgccctccccacccagaggacctccgggcaatgcctgtcccgcctcatgctggaggctgcctcgggcacctgcctgcccattaaagactggtcagacctgtctgagcccagtgatgggagctgtggcctcttcacccacacacagaaggatgccagtccctctgtcggtctgaggtcagcttcctggggctgccccaccctgagggctccttacagggtgctcctcacagccatcccatctgtacccccgggctctgtccaccctgctgctgccctgggcacagaccctgaggtctcagtcctgcctccagccaagtttctgcctggtgcccagtgattcctgctgggcaccccttcgctcactgcccctccaccatgcagcagccagacacacccacagcacccgcagacctctaggccgggtcccagacatggccttcccccaaaatacttcctgctgtcctgtctgtgcacagagcaagggactccccacctctgcgccctgtgctggtcatcatgggctctgtgctggtcaacccagcaagtgtcccgtttgcccaggagtccctggtgtcgtggcccaggtctcatggtggccctaagcctgccagccctgctgcccgccttgctgtcctgctctgagcatgggtgccaccctccagctcctgggcgtgtcacttctctctgagcctggggcctgcatgggcccccagccctccccagcctgcttgggccgctcctgctggcctccacaggccgtgagctgtcagtgtctcaagcaggggaagtgagggctgcctccaggcctccgtgtactgggtggacaatggcccccaaaggccgtcggcaagaacaccacctccaggacccctacagcagtgggctcaggacttgggcaccaagaggagagggtgggaagggctgcagagtcagggctgcacccaagaggagccacggagccggagccggagcggaggcccccaccgagggccccagggcctggcaggttccggaagagacagggccagcgggagtcattccctgcagccactagggggcagccgccacccgctcagcagccctgggaggcggcacgggcaggtgcgccttgggagggctgaggcaaagaccccgggtagaaaggcggcccccagctctgcgagacccctgccctcttgtccagtcccttccgagggtccgcaggtgagagcagcctgccctgcatcccaggctctggttccagggtccagggccctgcgctgccacctccctcgtgcttcagccaagaaaatgggggtgcaagtagggtgtttggggtcccagagacgcaggcgccgcggcgcgatcttcctgggcaggagggcagggctccccaacctgcctgagccggggtgggggtccaggtcccccacttgcccttgtgggaaaatccctgtctcagcagaatgggccaaggtcacgcaggtctccccagcacgtgttaatttggttaataaaactgtggatcaagg

SEQ ID NO: 1566 - protein, 694 aa, Homo sapiens
MILEERPDGAGAGEESPRLQGCDSLTQIQCGQLQSRRAQIHQQIDKELQMRTGAENLYRATSNNRVRETVALELSYVNSNLQLLKEELEELSGGVDPGRHGSEAVTVPMIPLGLKETKELDWSTPLKELISVHFGEDGASYEAEIRELEALRQAMRTPSRNESGLELLTAYYNQLCFLDARFLTPARSLGLFFHWYDSLTGVPAQQRALAFEKGSVLFNIGALHTQIGARQDRSCTEGARRAMEAFQRAAGAFSLLRENFSHAPSPDMSAASLCALEQLMMAQAQECVFEGLSPPASMAPQDCLAQLRLAQEAAQVAAEYRLVHRTMAQPPVHDYVPVSWTALVHVKAEYFRSLAHYHVAMALCDGSRECPPHLPMVLPRPPRGSQPLCPPAATEGELPTHEQVFLQPPTSSKPRGPVLPQELEERRQLGKAHLKRAILGQEEALRLHALCRVLREVDLLRAVISQTLQRSLAKYAELDREDDFCEAAEAPDIQPKTHQKPEARMPRLSQGKGPDIFHRLGPLSVFSAKNRWRLVGPVHLTRGEGGFGLTLRGDSPVLIAAVIPGSQAAAAGLKEGDYIVSVNGQPCRWWRHAEVVTELKAAGEAGASLQVVSLLPSSRLPSLGDRRPVLLGPRGLLRSQREHGCKTPASTWASPRPLLNWSRKAQQGKTGGCPQPCAPVKPAPPSSLKHPGWP

SEQ ID NO: 1567 - DNA, 1865 bp, Homo sapiens
aaggaagaaacattagaaagaaaaaggaaggaaaacggtataaagagagatcaattacccacccttaaatagctagattggggggggaggggggtggaaaagaaagctgtggaggtgtgccccagcacggctgctttgaaaggtttatcatctatccgtttggtttatggagaaaaagaaaatggtaactcagggtaaccaggagccgacaacaactcctgacgcaatggttcagccttttactaccatcccatttccaccacctccgcagaatggaattcccacagagtatggggtgccacacactcaagactatgccggccagaccggtgagcataacctgacactctacggaagtacgcaagcccacggggagcagagcagcaactcacccagcacacaaaatggatctcttacgcagacagaaggtggagcacagacagacggccagcagtcacagacacaaagtagtgaaaattcagagagtaaatctaccccgaaacggctgcatgtctctaatattcctttccgcttccgggaccctgacctccggcagatgtttgggcagtttggcaaaatcctagatgtagaaataatctttaatgaacgtggctctaagggattcgggttcgtaactttcgagaatagtgctgatgcagacagggccagggagaaattacacggcaccgtggtagagggccgtaaaatcgaggtgaataatgctacagcacgtgtaatgaccaataagaagatggtcacaccatatgcaaatggttggaaattaagcccagtagttggagctgtatatggtccggagttatatgcagcatccagctttcaagcagatgtgtccctaggcaatgatgcagcagtgcccctatcaggaagagggggtatcaacacttacattcctttaatcattcctggcttcccttaccctactgcagccaccacggcagccgctttcagaggagcccatttgaggggcagagggcggacagtatatggtgcagtccgagcggtacctccaacagccatccccgcctatccaggggtggatatgcagcctacagatatgcacagcctgctactgcaaccgcagccaccgctgctgcagccgctgcagccgcttacagtgacggttatggcagggtgtacacagccgacccctaccatgcccttgcccctgccgctagctatggagttggcgctgtggcgagtttataccgaggtggctacagccgatttgccccctactgaagtgacgtgagacccctgcaaatgggacagccccccagttcatgaggcctggctattgcaatatttactagtagaggaactctatagcaagatgaagaggaaaaacaaacaaacaaacaaaaaaaaacacaaaaaaagaaagaatacttttttatacctcactatgttctttgaatatgtatttttcctttaaatttctgcctttaattcttttgttccaaagattgtgcatttttttctttttttttttaaactgtggtaaaaaaaaaaaaaataatgcatttccatgtctgtatgtccgtgcttagcttattctatcaatcacggaagaggcagtcaaggaggaaggagagacattaggagccgataaatgcatctgatcagaaatcagcagacagaattaccaaagtgtatctggtgctgaatgactgggggacaagcagaagtggaagagatctttctgcaacaggatattcttctagtcttctgagtttctggtctttgacaggcaattctggttggctgtggctggaatccacatgctgatagataggaatttgtgcttacaaagcaggagaattaaaaagacgctttcctctcctctt

SEQ ID NO: 1568 - protein, 367 aa, Homo sapiens
MEKKKMVTQGNQEPTTTPDAMVQPFTTIPFPPPPQNGIPTEYGVPHTQDYAGQTGEHNLTLYGSTQAHGEQSSNSPSTQNGSLTQTEGGAQTDGQQSQTQSSENSESKSTPKRLHVSNIPFRFRDPDLRQMFGQFGKILDVEIIFNERGSKGFGFVTFENSADADRAREKLHGTVVEGRKIEVNNATARVMTNKKMVTPYANGWKLSPVVGAVYGPELYAASSFQADVSLGNDAAVPLSGRGGINTYIPLIIPGFPYPTAATTAAAFRGAHLRGRGRTVYGAVRAVPPTAIPAYPGVDMQPTDMHSLLLQPQPPLLQPLQPLTVTVMAGCTQPTPTMPLPLPLAMELALWRVYTEVATADLPPTEVT

SEQ ID NO: 1569 - DNA, 1914 bp, Homo sapiens
aaggaagaaacattagaaagaaaaaggaaggaaaacggtataaagagagatcaattacccacccttaaatagctagattggggggggaggggggtggaaaagaaagctgtggaggtgtgccccagcacggctgctttgaaaggtttatcatctatccgtttggtttatggagaaaaagaaaatggtaactcagggtaaccaggagccgacaacaactcctgacgcaatggttcagccttttactaccatcccatttccaccacctccgcagaatggaattcccacagagtatggggtgccacacactcaagactatgccggccagaccggtgagcataacctgacactctacggaagtacgcaagcccacggggagcagagcagcaactcacccagcacacaaaatggatctcttacgacagaaggtggagcacagacagacggccagcagtcacagacacaaagtagtgaaaattcagagagtaaatctaccccgaaacggctgcatgtctctaatattcctttccgcttccgggaccctgacctccggcagatgtttgggcagtttggcaaaatcctagatgtagaaataatctttaatgaacgtggctctaagggattcgggttcgtaactttcgagaatagtgctgatgcagacagggccagggagaaattacacggcaccgtggtagagggccgtaaaatcgaggtgaataatgctacagcacgtgtaatgaccaataagaagatggtcacaccatatgcaaatggttggaaattaagcccagtagttggagctgtatatggtccggagttatatgcagcatccagctttcaagcagatgtgtccctaggcaatgatgcagcagtgcccctatcaggaagagggggtatcaacacttacattcctttaatcagtaaactattatttcctggcttcccttaccctactgcagccaccacggcagccgctttcagaggagcccatttgaggggcagagggcggacagtatatggtgcagtccgagcggtacctccaacagccatccccgcctatccaggtgtggtttaccaggacggattttacggtgctgacctctatggtggatatgcagcctacagatatgcacagcctgctactgcaaccgcagccaccgctgctgcagccgctgcagccgcttacagtgacggttatggcagggtgtacacagccgacccctaccatgcccttgcccctgccgctagctatggagttggcgctgtggcgagtttataccgaggtggctacagccgatttgccccctactgaagtgacgtgagacccctgcaaatgggacagccccccagttcatgaggcctggctattgcaatatttactagtagaggaactctatagcaagatgaagaggaaaaacaaacaaacaaacaaaaaaaaacacaaaaaaagaaagaatacttttttatacctcactatgttctttgaatatgtatttttcctttaaatttctgcctttaattcttttgttccaaagattgtgcatttttttctttttttttttaaactgtggtaaaaaaaaaaaaaataatgcatttccatgtctgtatgtccgtgcttagcttattctatcaatcacggaagaggcagtcaaggaggaaggagagacattaggagccgataaatgcatctgatcagaaatcagcagacagaattaccaaagtgtatctggtgctgaatgactgggggacaagcagaagtggaagagatctttctgcaacaggatattcttctagtcttctgagtttctggtctttgacaggcaattctggttggctgtggctggaatccacatgctgatagataggaatttgtgcttacaaagcaggagaattaaaaagacgctttcctctcctctt

SEQ ID NO: 1570 - protein, 375 aa, Homo sapiens
MVTQGNQEPTTTPDAMVQPFTTIPFPPPPQNGIPTEYGVPHTQDYAGQTGEHNLTLYGSTQAHGEQSSNSPSTQNGSLTTEGGAQTDGQQSQTQSSENSESKSTPKRLHVSNIPFRFRDPDLRQMFGQFGKILDVEIIFNERGSKGFGFVTFENSADADRAREKLHGTVVEGRKIEVNNATARVMTNKKMVTPYANGWKLSPVVGAVYGPELYAASSFQADVSLGNDAAVPLSGRGGINTYIPLISKLLFPGFPYPTAATTAAAFRGAHLRGRGRTVYGAVRAVPPTAIPAYPGVVYQDGFYGADLYGGYAAYRYAQPATATAATAAAAAAAAYSDGYGRVYTADPYHALAPAASYGVGAVASLYRGGYSRFAPY

SEQ ID NO: 1571 - DNA, 1526 bp, Homo sapiens
ctgccagagaggaagagaaaagaaaggaagaaacattagaaagaaaaaggaaggaaaacggtataaagagagatcaattacccacccttaaatagctagattggggggggaggggggtggaaaagaaagctgtggaggtgtgccccagcacggctgctttgaaaggtttatcatctatccgtttggtttatggagaaaaagaaaatggtaactcagggtaaccaggagccgacaacaactcctgacgcaatggttcagccttttactaccatcccatttccaccacctccgcagaatggaattcccacagagtatggggtgccacacactcaagactatgccggccagaccggtgagcataacctgacactctacggaagtacgcaagcccacggggagcagagcagcaactcacccagcacacaaaatggatctcttacgacagaaggtggagcacagacagacggccagcagtcacagacacaaagtagtgaaaattcagagagtaaatctaccccgaaacggctgcatgtctctaatattcctttccgcttccgggaccctgacctccggcagatgtttgggggattcgggttcgtaactttcgagaatagtgctgatgcagacagggccagggagaaattacacggcaccgtggtagagggccgtaaaatcgaggtgaataatgctacagcacgtgtaatgaccaataagaagatggtcacaccatatgcaaatggttggaaattaagcccagtagttggagctgtatatggtccggagttatatgcagcatccagctttcaagcagatgtgtccctaggcaatgatgcagcagtgcccctatcaggaagagggggtatcaacacttacattcctttaatcattcctggcttcccttaccctactgcagccaccacggcagccgctttcagaggagcccatttgaggggcagagggcggacagtatatggtgcagtccgagcggtacctccaacagccatccccgcctatccaggtgtggtttaccaggacggattttacggtgctgacctctatggtggatatgcagcctacagatatgcacagcctgctactgcaaccgcagccaccgctgctgcagccgctgcagccgcttacagtgacggttatggcagggtgtacacagccgacccctaccatgcccttgcccctgccgctagctatggagttggcgctgtggcgagtttataccgaggtggctacagccgatttgccccctactgaagtgacgtgagacccctgcaaatgggacagccccccagttcatgaggcctggctattgcaatatttactagtagaggaactctatagcaagatgaagaggaaaaacaaacaaacaaacaaaaaaaaacacaaaaaaagaaagaatacttttttatacctcactatgttctttgaatatgtatttttcctttaaatttctgcctttaattcttttgttccaaagattgtgcatttttttctttttttttttaaactgtggt

SEQ ID NO: 1572 - protein, 353 aa, Homo sapiens
MVTQGNQEPTTTPDAMVQPFTTIPFPPPPQNGIPTEYGVPHTQDYAGQTGEHNLTLYGSTQAHGEQSSNSPSTQNGSLTTEGGAQTDGQQSQTQSSENSESKSTPKRLHVSNIPFRFRDPDLRQMFGGFGFVTFENSADADRAREKLHGTVVEGRKIEVNNATARVMTNKKMVTPYANGWKLSPVVGAVYGPELYAASSFQADVSLGNDAAVPLSGRGGINTYIPLIIPGFPYPTAATTAAAFRGAHLRGRGRTVYGAVRAVPPTAIPAYPGVVYQDGFYGADLYGGYAAYRYAQPATATAATAAAAAAAAYSDGYGRVYTADPYHALAPAASYGVGAVASLYRGGYSRFAPY

SEQ ID NO: 1573 - DNA, 1507 bp, Homo sapiens
agtcggggccgaggcccagggggaggtggcctgtcgcgggtcgcccggctcccggaggcgaggggggcgcgggcggatggcggagggcgcccagccgcatcagccgcctcagctcgggcccggcgccgccgcccggggcatgaagcgggagtcggagctggagctgccggtgcccggagcgggaggagacggagccgatcccggcctgagcaagcggccgcgcactgaggaggcggcggccgacggtggcggcgggatgcagaacgagcctctgactccaggttatcatggattcccagcgcgggacagccagggtaaccaggagccgacaacaactcctgacgcaatggttcagccttttactaccatcccatttccaccacctccgcagaatggaattcccacagagtatggggtgccacacactcaagactatgccggccagaccggtgagcataacctgacactctacggaagtacgcaagcccacggggagcagagcagcaactcacccagcacacaaaatggatctcttacgacagaaggtggagcacagacagacggccagcagtcacagacacaaagtagtgaaaattcagagagtaaatctaccccgaaacggctgcatgtctctaatattcctttccgcttccgggaccctgacctccggcagatgtttgggcagtttggcaaaatcctagatgtagaaataatctttaatgaacgtggctctaagggattcgggttcgtaactttcgagaatagtgctgatgcagacagggccagggagaaattacacggcaccgtggtagagggccgtaaaatcgaggtgaataatgctacagcacgtgtaatgaccaataagaagatggtcacaccatatgcaaatggttggaaattaagcccagtagttggagctgtatatggtccggagttatatgcagcatccagctttcaagcagatgtgtccctaggcaatgatgcagcagtgcccctatcaggaagagggggtatcaacacttacattcctttaatcattcctggcttcccttaccctactgcagccaccacggcagccgctttcagaggagcccatttgaggggcagagggcggacagtatatggtgcagtccgagcggtacctccaacagccatccccgcctatccaggggtggatatgcagcctacagatatgcacagcctgctactgcaaccgcagccaccgctgctgcagccgctgcagccgcttacagtgacggttatggcagggtgtacacagccgacccctaccatgcccttgcccctgccgctagctatggagttggcgctgtggcgagtttataccgaggtggctacagccgatttgccccctactgaagtgacgtgagacccctgcaaatgggacagccccccagttcatgaggcctggctattgcaatatttactagtagaggaactctatagcaagatgaagaggaaaaacaaacaaacaaacaaaaaaaaacac

SEQ ID NO: 1574 - protein, 376 aa, Homo sapiens
MQNEPLTPGYHGFPARDSQGNQEPTTTPDAMVQPFTTIPFPPPPQNGIPTEYGVPHTQDYAGQTGEHNLTLYGSTQAHGEQSSNSPSTQNGSLTTEGGAQTDGQQSQTQSSENSESKSTPKRLHVSNIPFRFRDPDLRQMFGQFGKILDVEIIFNERGSKGFGFVTFENSADADRAREKLHGTVVEGRKIEVNNATARVMTNKKMVTPYANGWKLSPVVGAVYGPELYAASSFQADVSLGNDAAVPLSGRGGINTYIPLIIPGFPYPTAATTAAAFRGAHLRGRGRTVYGAVRAVPPTAIPAYPGVDMQPTDMHSLLLQPQPPLLQPLQPLTVTVMAGCTQPTPTMPLPLPLAMELALWRVYTEVATADLPPTEVT

SEQ ID NO: 1575 - DNA, 5598 bp, Homo sapiens
gtcaaaatgagtctgctgatgtttacacaactactgctctgtggatttttatatgttcgggttgatggatcgcgtcttcgccaggaggactttcccccgcggattgtggagcatccttccgatgtcatcgtctctaagggcgagcccacgactctgaactgcaaggcggagggccggccaacgcccaccattgagtggtacaaagatggggagcgagtggagactgacaaggacgatccccggtcccacaggatgcttctgcccagcggatccttattcttcttgcgcatcgtgcacgggcgcaggagtaaacctgatgaaggaagctacgtttgtgttgcgaggaactatcttggtgaagcagtgagtcgaaatgcgtctctggaagtggcattgttacgagatgacttccgacaaaaccccacagatgttgtagtggcagctggagagcctgcaatcctggagtgccagcctccccggggacacccagaacccaccatctactggaaaaaagacaaagttcgaattgatgacaaggaagaaagaataagtatccgtggtggaaaactgatgatctccaataccaggaaaagtgatgcagggatgtatacttgtgttggtaccaatatggtgggagaaagggacagtgacccagcagagctgactgtctttgaacgacccacatttctcaggaggccaattaaccaggtggtactggaggaagaagctgtagaatttcgttgtcaagtccaaggagatcctcaaccaactgtgaggtggaaaaaggatgatgcagacttgccaagaggaaggtatgacatcaaagacgattacacactaagaattaaaaagaccatgagtacagatgaaggcacctatatgtgtattgctgagaatcgggttggaaaaatggaagcctctgctacactcaccgtccgagctcccccacagtttgtggttcggccaagagatcagattgttgctcaaggtcgaacagtgacatttccctgtgaaactaaaggaaacccacagccagctgttttttggcagaaagaaggcagccagaacctacttttcccaaaccaaccccagcagcccaacagtagatgctcagtgtcaccaactggagacctcacaatcaccaacattcaacgttccgacgcgggttactacatctgccaggctttaactgtggcaggaagcattttagcaaaagctcaactggaggttactgatgttttgacagatagacctccacctataattctacaaggcccagccaaccaaacgctggcagtggatggtacagcgttactgaaatgtaaagccactggtgatcctcttcctgtaattagctggttaaaggagggatttacttttccgggtagagatccaagagcaacaattcaagagcaaggcacactgcagattaagaatttacggatttctgatactggcacttatacttgtgtggctacaagttcaagtggagagacttcctggagtgcagtgctggatgtgacagagtctggagcaacaatcagtaaaaactatgatttaagtgacctgccagggccaccatccaaaccgcaggtcactgatgttactaagaacagtgtcaccttgtcctggcagccaggtacccctggaacccttccagcaagtgcatatatcattgaggctttcagccaatcagtgagcaacagctggcagaccgtggcaaaccatgtaaagaccaccctctatactgtaagaggactgcggcccaatacaatctacttattcatggtcagagcgatcaacccccaaggtctcagtgacccaagtcccatgtcagatcctgtgcgcacacaagatatcagcccaccagcacaaggagtggaccacaggcaagtgcagaaagagctaggagatgtccttgtccgtcttcataatccagttgtgctgactcccaccacggttcaggtcacatggacggttgatcgccaaccccagtttatccaaggctaccgagtgatgtatcgtcagacttcaggtctgcaggcgacatcttcgtggcagaatttagatgccaaagtcccgactgaacgaagtgctgtcttagtcaacctgaaaaagggggtgacttatgaaattaaagtacggccatattttaatgagttccaaggaatggatagtgaatctaaaacggttcgtactactgaagaagccccaagtgccccaccacagtctgtcactgtactgacagttggaagctacaatagcacaagtattagtgtttcctgggatcctcctcctccagatcaccagaatggaattatccaagaatacaagatctggtgtctaggaaatgaaacgcgattccatatcaacaaaactgtggatgcagccattcggtccgtaataattggtggattattcccaggtattcaataccgggtagaggttgcagctagtaccagtgcaggggttggagtaaagagtgagccacagccaataataatcgggagacgcaatgaagttgtcattactgaaaacaataacagcataactgagcaaatcactgatgtggtgaagcaaccagcctttatagctggtattggtggtgcctgctgggtaattctgatgggttttagcatatggttgtattggcgaagaaagaagaggaagggactcagtaattatgctgttacgtttcaaagaggagatggaggactaatgagcaatggaagccgtccaggtcttctcaatgctggtgatcccagctatccatggcttgctgattcttggccagccacgagcttgccagtaaataatagcaacagtggcccaaatgagattggaaattttggccgtggagatgtgctgccaccagttccaggccaaggggataaaacagcaacgatgctctcagatggagccatttatagtagcattgacttcactaccaaaaccagttacaacagttccagccaaataacacaggctaccccatatgccacgacacagatcttgcattccaacagcatacatgaattggctgtcgatctgcctgatccacaatggaaaagctcaattcagcaaaaaacagatctgatgggatttggttattctctacctgatcagaacaaaggtaacaatggtgggaaaggtggaaaaaagaagaaaaataaaaactcttctaaaccacagaaaaacaatggatccacttgggccaatgtccctctacctccccccccagtccagccccttcctggcacggagctggaacactatgcagtggaacaacaagaaaatggctatgacagtgatagctggtgcccaccattgccagtacaaacttacttacaccaaggtctggaagatgaactggaagaagatgatgatagggtcccaacacctcctgttcgaggcgtggcttcttctcctgctatctcctttggacagcagtccactgcaactcttactccatccccacgggaagagatgcaacccatgctgcaggctcacctggatgagttgacaagagcctatcagtttgatatagcaaaacaaacatggcacattcaaagcaataatcaacctccacagcctccagttccaccgttaggttatgtgtctggagccttgatttctgatttggaaacggatgttgcagatgatgatgccgacgacgaagaggaagctttagaaatccccaggcccctgagagcactggaccagactcctggatccagcatggacaatctagacagctctgtgacaggaaaagcctttacctcctctcaaagacctcgacctaccagcccattttctactgacagtaacaccagtgcagccctgagtcaaagtcagaggcctcggcccactaaaaaacacaagggagggcggatggaccaacaaccagcattgcctcatcgaagggaaggaatgacagatgaggaggccttggtgccctatagcaagcccagtttcccatctccaggtggccacagctcatcaggaacagcttcttctaagggatccactggacctaggaaaaccgaggtgttgagagcaggccaccagcgcaatgccagcgaccttcttgacataggatatatgggctccaacagtcaaggacagtttacaggtgaattatagtaaatgagaggagacatacaaagctgctctgaaggaccatcaggtccggactcatggaagtgatgactctaaacagtgcaatgaacaatttatttatgtactattaaaagaactgtaaatgcaatgtaaagacacacagccacacatatcccacagatattttcattgtgttcttctcttaagtacaccacccaccttaactctttcttgtcaggagtatataaaaaagaaagaaaacaaaactcgccctacaggaagaaaaggattctcctctgtatataatttcttttgtgcattgctatgcaagctcactctttttagctctgctcatattattgtctgttcttattggtctgttgtactatatgtgaattaataggctgtggtgccatatattaacttttaattgtgtaacttttatgtttaaattttgcactgcaattttatttggtgataagcacaaatctctactcctcatgacatgaagaaaaagactgaatgtgaagggagtttctgtactgtaagctagattggataatgatggctgtaacaaatcatgttagatggttttcagttggggtgtagaaataggaagatgcaaaggaacaatggtgttggcaaagtcttctttgaatatcagggactgagtcaataaaaaaaatagtagaaaggtggcttttactattgacaaaagccggggtcaaaaaaagtagtttaagtcttaagactgaatatgcattaaagtatgcaggtagcaaagatgtaataaatttgcttaaaaaaagaaattaaagttttatttagaatcaattttacctgtcattgtaattgacccatctgagaattacaataagcaagaggaaattaaggtgttttgcaagagctgtatttatattacagttttttaaaaacattttctgaattatcgtaattaagctctccaactcgttaagtcagaatataatatgaagttccccaaggaaacgaacaaaatgaactctagaatatctagcaaatagttaaagaagcaatttattattagggcatactcgggctgtttccaaatataaactctattgcaatatcttatttcatctttctaatacatgtacagtgcacactagaggatagagctgcatcacttaaattcatgacttaaaaaataatacagtttatatacaacttgttttttatttgattaagaagtgaagtttacgccacccaatgtatagccaaattgtacgtgcttaaaaaacagtgccgagagtatgttcagttcgcagtaagtagatttattggaataaatattctatggtacattctcagaaattggcttccaactaaaatacgtttgacccattttgaataaggaaattgaaaagaaaaatttaaaaggagaaaaaaatgcatgtttataaactttttaaataaaaccagaccttgtaagtggacatt

SEQ ID NO: 1576 - protein, 1380 aa, Homo sapiens
VKMSLLMFTQLLLCGFLYVRVDGSRLRQEDFPPRIVEHPSDVIVSKGEPTTLNCKAEGRPTPTIEWYKDGERVETDKDDPRSHRMLLPSGSLFFLRIVHGRRSKPDEGSYVCVARNYLGEAVSRNASLEVALLRDDFRQNPTDVVVAAGEPAILECQPPRGHPEPTIYWKKDKVRIDDKEERISIRGGKLMISNTRKSDAGMYTCVGTNMVGERDSDPAELTVFERPTFLRRPINQVVLEEEAVEFRCQVQGDPQPTVRWKKDDADLPRGRYDIKDDYTLRIKKTMSTDEGTYMCIAENRVGKMEASATLTVRAPPQFVVRPRDQIVAQGRTVTFPCETKGNPQPAVFWQKEGSQNLLFPNQPQQPNSRCSVSPTGDLTITNIQRSDAGYYICQALTVAGSILAKAQLEVTDVLTDRPPPIILQGPANQTLAVDGTALLKCKATGDPLPVISWLKEGFTFPGRDPRATIQEQGTLQIKNLRISDTGTYTCVATSSSGETSWSAVLDVTESGATISKNYDLSDLPGPPSKPQVTDVTKNSVTLSWQPGTPGTLPASAYIIEAFSQSVSNSWQTVANHVKTTLYTVRGLRPNTIYLFMVRAINPQGLSDPSPMSDPVRTQDISPPAQGVDHRQVQKELGDVLVRLHNPVVLTPTTVQVTWTVDRQPQFIQGYRVMYRQTSGLQATSSWQNLDAKVPTERSAVLVNLKKGVTYEIKVRPYFNEFQGMDSESKTVRTTEEAPSAPPQSVTVLTVGSYNSTSISVSWDPPPPDHQNGIIQEYKIWCLGNETRFHINKTVDAAIRSVIIGGLFPGIQYRVEVAASTSAGVGVKSEPQPIIIGRRNEVVITENNNSITEQITDVVKQPAFIAGIGGACWVILMGFSIWLYWRRKKRKGLSNYAVTFQRGDGGLMSNGSRPGLLNAGDPSYPWLADSWPATSLPVNNSNSGPNEIGNFGRGDVLPPVPGQGDKTATMLSDGAIYSSIDFTTKTSYNSSSQITQATPYATTQILHSNSIHELAVDLPDPQWKSSIQQKTDLMGFGYSLPDQNKGNNGGKGGKKKKNKNSSKPQKNNGSTWANVPLPPPPVQPLPGTELEHYAVEQQENGYDSDSWCPPLPVQTYLHQGLEDELEEDDDRVPTPPVRGVASSPAISFGQQSTATLTPSPREEMQPMLQAHLDELTRAYQFDIAKQTWHIQSNNQPPQPPVPPLGYVSGALISDLETDVADDDADDEEEALEIPRPLRALDQTPGSSMDNLDSSVTGKAFTSSQRPRPTSPFSTDSNTSAALSQSQRPRPTKKHKGGRMDQQPALPHRREGMTDEEALVPYSKPSFPSPGGHSSSGTASSKGSTGPRKTEVLRAGHQRNASDLLDIGYMGSNSQGQFTGEL

SEQ ID NO: 1577 - DNA, 4262 bp, Homo sapiens
aaagtgctcgggacaaggacatagggctgagagtagccatgggctctggaggagacagcctcctggggggcaggggttccctgcctctgctgctcctgctcatcatgggaggcatggctcaggactccccgccccagatcctagtccacccccaggaccagctgttccagggccctggccctgccaggatgagctgccaagcctcaggccagccacctcccaccatccgctggttgctgaatgggcagcccctgagcatggtgcccccagacccacaccacctcctgcctgatgggacccttctgctgctacagccccctgcccggggacatgcccacgatggccaggccctgtccacagacctgggtgtctacacatgtgaggccagcaaccggcttggcacggcagtcagcagaggcgctcggctgtctgtggctgtcctccgggaggatttccagatccagcctcgggacatggtggctgtggtgggtgagcagtttactctggaatgtgggccgccctggggccacccagagcccacagtctcatggtggaaagatgggaaacccctggccctccagcccggaaggcacacagtgtccggggggtccctgctgatggcaagagcagagaagagtgacgaagggacctacatgtgtgtggccaccaacagcgcaggacatagggagagccgcgcagcccgggtttccatccaggagccccaggactacacggagcctgtggagcttctggctgtgcgaattcagctggaaaatgtgacactgctgaacccggatcctgcagagggccccaagcctagaccggcggtgtggctcagctggaaggtcagtggccctgctgcgcctgcccaatcttacacggccttgttcaggacccagactgccccgggaggccagggagctccgtgggcagaggagctgctggccggctggcagagcgcagagcttggaggcctccactggggccaagactacgagttcaaagtgagaccatcctctggccgggctcgaggccctgacagcaacgtgctgctcctgaggctgccggaaaaagtgcccagtgccccacctcaggaagtgactctaaagcctggcaatggcactgtctttgtgagctgggtcccaccacctgctgaaaaccacaatggcatcatccgtggctaccaggtctggagcctgggcaacacatcactgccaccagccaactggactgtagttggtgagcagacccagctggaaatcgccacccatatgccaggctcctactgcgtgcaagtggctgcagtcactggtgctggagctggggagcccagtagacctgtctgcctccttttagagcaggccatggagcgagccacccaagaacccagtgagcatggtccctggaccctggagcagctgagggctaccttgaagcggcctgaggtcattgccacctgcggtgttgcactctggctgctgcttctgggcaccgccgtgtgtatccaccgccggcgccgagctagggtgcacctgggcccaggtctgtacagatataccagtgaggatgccatcctaaaacacaggatggatcacagtgactcccagtggttggcagacacttggcgttccacctctggctctcgggacctgagcagcagcagcagcctcagcagtcggctgggggcggatgcccgggacccactagactgtcgtcgctccttgctctcctgggactcccgaagccccggcgtgcccctgcttccagacaccagcactttttatggctccctcatcgctgagctgccctccagtaccccagccaggccaagtccccaggtcccagctgtcaggcgcctcccaccccagctggcccagctctccagcccctgttccagctcagacagcctctgcagccgcaggggactctcttctccccgcttgtctctggcccctgcagaggcttggaaggccaaaaagaagcaggagctgcagcatgccaacagttccccactgctccggggcagccactccttggagctccgggcctgtgagttaggaaatagaggttccaagaacctttcccaaagcccaggagctgtgccccaagctctggttgcctggcgggccctgggaccgaaactcctcagctcctcaaatgagctggttactcgtcatctccctccagcacccctctttcctcatgaaactcccccaactcagagtcaacagacccagcctccggtggcaccacaggctccctcctccatcctgctgccagcagcccccatccccatccttagcccctgcagtccccctagcccccaggcctcttccctctctggccccagcccagcttccagtcgcctgtccagctcctcactgtcatccctgggggaggatcaagacagcgtgctgacccctgaggaggtagccctgtgcttggaactcagtgagggtgaggagactcccaggaacagcgtctctcccatgccaagggctccttcaccccccaccacctatgggtacatcagcgtcccaacagcctcagagttcacggacatgggcaggactggaggaggggtggggcccaaggggggagtcttgctgtgcccacctcggccctgcctcacccccacccccagcgagggctccttagccaatggttggggctcagcctctgaggacaatgccgccagcgccagagccagccttgtcagctcctccgatggctccttcctcgctgatgctcactttgcccgggccctggcagtggctgtggatagctttggtttcggtctagagcccagggaggcagactgcgtcttcatagatgcctcatcacctccctccccacgggatgagatcttcctgacccccaacctctccctgcccctgtgggagtggaggccagactggttggaagacatggaggtcagccacacccagcggctgggaagggggatgcctccctggccccctgactctcagatctcttcccagagaagtcagctccactgtcgtatgcccaaggctggtgcttctcctgtagattactcctgaaccgtgtccctgagacttcccagacgggaatcagaaccacttctcctgtccacccacaagacctgggctgtggtgtgtgggtcttggcctgtgtttctctgcagctggggtccaccttcccaagcctccagagagttctccctccacgattgtgaaaacaaatgaaaacaaaattagagcaaagctgacctggagccctcagggagcaaaacatcatctccacctgactcctagccactgctttctcctctgtgccatccactcccaccaccaggttgttttggcctgaggagcagccctgcctgctgctcttcccccaccatttggatcacaggaagtggaggagccagaggtgcctttgtggaggacagcagtggctgctgggagagggctgtggaggaaggagcttctcggagccccctctcagccttacctgggcccctcctctagagaagagctcaactctctcccaacctcaccatggaaagaaaataattatgaatgccactgaggcactgaggccctacctcatgccaaacaaagggttcaaggctgggtctagcgaggatgctgaaggaagggaggtatgagaccgtaggtcaaaagcaccatcctcgtactgttgtcactatgagcttaagaaatttgataccataaaatggtaaagacttgagttctgtgagatcattccccggagcaccatttttaggggagcacctggagagatggcaagaatttcctgagttaggcagggatcaggcattcattgacactcagggagtgtcacacatttctgttctgcaattaaagggagaatgaggttcatccaccaaattttaagcagaatataggaagggcaggggtggggagtttcagggtctgctggtcctggcaacttatattaaatccacctcctcaagataagccttagggatatttatggctgagggaagtgggatggtctaaggcatggggaagggtgattggctgtggggaaaatgaagtaataggttcattctgcccaagtgtacttggggttcatggcatttcataaggacatttgtgtagaaaattgttttgctggctgggcacggtggctcacgcctgtaatcccagcactttgggaggcggaggtaggcagatcatgaggtcaggagatcgagaccatcctggctaacatggtgaaaccccgtctctact

SEQ ID NO: 1578 - protein, 1007 aa, Homo sapiens
MGSGGDSLLGGRGSLPLLLLLIMGGMAQDSPPQILVHPQDQLFQGPGPARMSCQASGQPPPTIRWLLNGQPLSMVPPDPHHLLPDGTLLLLQPPARGHAHDGQALSTDLGVYTCEASNRLGTAVSRGARLSVAVLREDFQIQPRDMVAVVGEQFTLECGPPWGHPEPTVSWWKDGKPLALQPGRHTVSGGSLLMARAEKSDEGTYMCVATNSAGHRESRAARVSIQEPQDYTEPVELLAVRIQLENVTLLNPDPAEGPKPRPAVWLSWKVSGPAAPAQSYTALFRTQTAPGGQGAPWAEELLAGWQSAELGGLHWGQDYEFKVRPSSGRARGPDSNVLLLRLPEKVPSAPPQEVTLKPGNGTVFVSWVPPPAENHNGIIRGYQVWSLGNTSLPPANWTVVGEQTQLEIATHMPGSYCVQVAAVTGAGAGEPSRPVCLLLEQAMERATQEPSEHGPWTLEQLRATLKRPEVIATCGVALWLLLLGTAVCIHRRRRARVHLGPGLYRYTSEDAILKHRMDHSDSQWLADTWRSTSGSRDLSSSSSLSSRLGADARDPLDCRRSLLSWDSRSPGVPLLPDTSTFYGSLIAELPSSTPARPSPQVPAVRRLPPQLAQLSSPCSSSDSLCSRRGLSSPRLSLAPAEAWKAKKKQELQHANSSPLLRGSHSLELRACELGNRGSKNLSQSPGAVPQALVAWRALGPKLLSSSNELVTRHLPPAPLFPHETPPTQSQQTQPPVAPQAPSSILLPAAPIPILSPCSPPSPQASSLSGPSPASSRLSSSSLSSLGEDQDSVLTPEEVALCLELSEGEETPRNSVSPMPRAPSPPTTYGYISVPTASEFTDMGRTGGGVGPKGGVLLCPPRPCLTPTPSEGSLANGWGSASEDNAASARASLVSSSDGSFLADAHFARALAVAVDSFGFGLEPREADCVFIDASSPPSPRDEIFLTPNLSLPLWEWRPDWLEDMEVSHTQRLGRGMPPWPPDSQISSQRSQLHCRMPKAGASPVDYS

SEQ ID NO: 1579 - DNA, 3742 bp, Homo sapiens
gagcagcaggacaaagtgctcgggacaaggacatagggctgagagtagccatgggctctggaggagacagcctcctggggggcaggggttccctgcctctgctgctcctgctcatcatgggaggcatggctcaggactccccgccccagatcctagtccacccccaggaccagctgttccagggccctggccctgccaggatgagctgccaagcctcaggccagccacctcccaccatccgctggttgctgaatgggcagcccctgagcatggtgcccccagacccacaccacctcctgcctgatgggacccttctgctgctacagccccctgcccggggacatgcccacgatggccaggccctgtccacagacctgggtgtctacacatgtgaggccagcaaccggcttggcacggcagtcagcagaggcgctcggctgtctgtggctgtcctccgggaggatttccagatccagcctcgggacatggtggctgtggtgggtgagcagtttactctggaatgtgggccgccctggggccacccagagcccacagtctcatggtggaaagatgggaaacccctggccctccagcccggaaggcacacagtgtccggggggtccctgctgatggcaagagcagagaagagtgacgaagggacctacatgtgtgtggccaccaacagcgcaggacatagggagagccgcgcagcccgggtttccatccaggagccccaggactacacggagcctgtggagcttctggctgtgcgaattcagctggaaaatgtgacactgctgaacccggatcctgcagagggccccaagcctagaccggcggtgtggctcagctggaaggtcagtggccctgctgcgcctgcccaatcttacacggccttgttcaggacccagactgccccgggaggccagggagctccgtgggcagaggagctgctggccggctggcagagcgcagagcttggaggcctccactggggccaagactacgagttcaaagtgagaccatcctctggccgggctcgaggccctgacagcaacgtgctgctcctgaggctgccggaaaaagtgcccagtgccccacctcaggaagtgactctaaagcctggcaatggcactgtctttgtgagctgggtcccaccacctgctgaaaaccacaatggcatcatccgtggctaccaggtctggagcctgggcaacacatcactgccaccagccaactggactgtagttggtgagcagacccagctggaaatcgccacccatatgccaggctcctactgcgtgcaagtggctgcagtcactggtgctggagctggggagcccagtagacctgtctgcctccttttagagcaggccatggagcgagccacccaagaacccagtgagcatggtccctggaccctggagcagctgagggctaccttgaagcggcctgaggtcattgccacctgcggtgttgcactctggctgctgcttctgggcaccgccgtgtgtatccaccgccggcgccgagctagggtgcacctgggcccaggtctgtacagatataccagtgaggatgccatcctaaaacacaggatggatcacagtgactcccagtggttggcagacacttggcgttccacctctggctctcgggacctgagcagcagcagcagcctcagcagtcggctgggggcggatgcccgggacccactagactgtcgtcgctccttgctctcctgggactcccgaagccccggcgtgcccctgcttccagacaccagcactttttatggctccctcatcgctgagctgccctccagtaccccagccaggccaagtccccaggtcccagctgtcaggcgcctcccaccccagctggcccagctctccagcccctgttccagctcagacagcctctgcagccgcaggggactctcttctccccgcttgtctctggcccctgcagaggcttggaaggccaaaaagaagcaggagctgcagcatgccaacagttccccactgctccggggcagccactccttggagctccgggcctgtgagttaggaaatagaggttccaagaacctttcccaaagcccaggagctgtgccccaagctctggttgcctggcgggccctgggaccgaaactcctcagccaaatgagctggttactcgtcatctccctccagcacccctctttcctcatgaaactcccccaactcagagtcaacagacccagcctccggtggcaccacaggctccctcctccatcctgctgccagcagcccccatccccatccttagcccctgcagtccccctagcccccaggcctcttccctctctggccccagcccagcttccagtcgcctgtccagctcctcactgtcatccctgggggaggatcaagacagcgtgctgacccctgaggaggtagccctgtgcttggaactcagtgagggtgaggagactcccaggaacagcgtctctcccatgccaagggctccttcaccccccaccacctatgggtacatcagcgtcccaacagcctcagagttcacggacatgggcaggactggaggaggggtggggcccaaggggggagtcttgctgtgcccacctcggccctgcctcacccccacccccagcgagggctccttagccaatggttggggctcagcctctgaggacaatgccgccagcgccagagccagccttgtcagctcctccgatggctccttcctcgctgatgctcactttgcccgggccctggcagtggctgtggatagctttggtttcggtctagagcccagggaggcagactgcgtcttcatagatgcctcatcacctccctccccacgggatgagatcttcctgacccccaacctctccctgcccctgtgggagtggaggccagactggttggaagacatggaggtcagccacacccagcggctgggaagggggatgcctccctggccccctgactctcagatctcttcccagagaagtcagctccactgtcgtatgcccaaggctggtgcttctcctgtagattactcctgaaccgtgtccctgagacttcccagacgggaatcagaaccacttctcctgtccacccacaagacctgggctgtggtgtgtgggtcttggcctgtgtttctctgcagctggggtccaccttcccaagcctccagagagttctccctccacgattgtgaaaacaaatgaaaacaaaattagagcaaagctgacctggagccctcagggagcaaaacatcatctccacctgactcctagccactgctttctcctctgtgccatccactcccaccaccaggttgttttggcctgaggagcagccctgcctgctgctcttcccccaccatttggatcacaggaagtggaggagccagaggtgcctttgtggaggacagcagtggctgctgggagagggctgtggaggaaggagcttctcggagccccctctcagccttacctgggcccctcctctagagaagagctcaactctctcccaacctcaccatggaaagaaaataattatgaatgccactgaggcactgaggccctacctcatgccaaacaaagggttcaaggctgggtctagcgaggatgctgaaggaagggaggtatgagaccgtaggtcaaaagcaccatcctcgtactgttgtcactatgagcttaagaaatttgataccataaaatggtaaagacttg

SEQ ID NO: 1580 - protein, 791 aa, Homo sapiens
MGSGGDSLLGGRGSLPLLLLLIMGGMAQDSPPQILVHPQDQLFQGPGPARMSCQASGQPPPTIRWLLNGQPLSMVPPDPHHLLPDGTLLLLQPPARGHAHDGQALSTDLGVYTCEASNRLGTAVSRGARLSVAVLREDFQIQPRDMVAVVGEQFTLECGPPWGHPEPTVSWWKDGKPLALQPGRHTVSGGSLLMARAEKSDEGTYMCVATNSAGHRESRAARVSIQEPQDYTEPVELLAVRIQLENVTLLNPDPAEGPKPRPAVWLSWKVSGPAAPAQSYTALFRTQTAPGGQGAPWAEELLAGWQSAELGGLHWGQDYEFKVRPSSGRARGPDSNVLLLRLPEKVPSAPPQEVTLKPGNGTVFVSWVPPPAENHNGIIRGYQVWSLGNTSLPPANWTVVGEQTQLEIATHMPGSYCVQVAAVTGAGAGEPSRPVCLLLEQAMERATQEPSEHGPWTLEQLRATLKRPEVIATCGVALWLLLLGTAVCIHRRRRARVHLGPGLYRYTSEDAILKHRMDHSDSQWLADTWRSTSGSRDLSSSSSLSSRLGADARDPLDCRRSLLSWDSRSPGVPLLPDTSTFYGSLIAELPSSTPARPSPQVPAVRRLPPQLAQLSSPCSSSDSLCSRRGLSSPRLSLAPAEAWKAKKKQELQHANSSPLLRGSHSLELRACELGNRGSKNLSQSPGAVPQALVAWRALGPKLLSQMSWLLVISLQHPSFLMKLPQLRVNRPSLRWHHRLPPPSCCQQPPSPSLAPAVPLAPRPLPSLAPAQLPVACPAPHCHPWGRIKTAC

SEQ ID NO: 1581 - DNA, 3508 bp, Homo sapiens
ggcgcccctcctgccgccccccgcccggcctcgcactccgcttccggccgctctcgctgcggccgcacccgcgcccgtgcccgccccgcgcctgccccgcgcctcatggagggcgcagggccccggggggccgggccggcgcggcgccggggagccggggggccgccgtcaccgctgctgccgtcgctgctgctgctgctgctgctctggatgctgccggacaccgtggcgcctcaggaactgaaccctcgcggccgcaacgtgtgccgtgctcccggctcccaggtgcccacgtgctgcgctggctggaggcagcaaggggacgagtgtgggattgcggtgtgcgaaggcaactccacgtgctcagagaacgaggtgtgcgtgaggcctggcgagtgccgctgccgccacggctacttcggtgccaactgcgacaccaagtgcccgcgccagttctggggccccgactgcaaggagctgtgtagctgccacccacacgggcagtgcgaggacgtgacaggccagtgtacttgtcacgcgcggcgctggggcgcgcgctgcgagcatgcgtgccagtgccagcacggcacgtgccacccgcggagcggcgcgtgccgctgtgagcccggctggtggggcgcgcagtgcgccagcgcgtgctactgcagcgccacgtcgcgctgcgacccacagaccggcgcctgcctgtgccacgcaggctggtggggccgcagctgcaacaaccagtgcgcctgcaactcgtctccctgcgagcagcagagcggccgctgtcagtgccgcgagcgtacgttcggcgcgcgctgcgatcgctactgccagtgcttccgcggccgctgccaccctgtggacggcacgtgtgcctgcgagccgggctaccgcggcaagtactgtcgcgagccgtgccccgccggcttctacggcttgggctgtcgccgccggtgtggccagtgcaagggccagcagccgtgcacggtggccgagggccgctgcttgacgtgcgagcccggctggaacggaaccaagtgcgaccagccttgcgccaccggtttctatggcgagggctgcagccaccgctgtccgccatgccgcgacgggcatgcctgtaaccatgtcaccggcaagtgtacgcgctgcaacgcgggctggatcggcgaccggtgcgagaccaagtgtagcaatggcacttacggcgaggactgcgccttcgtgtgcgccgactgcggcagcggacactgcgacttccagtcggggcgctgcctgtgcagccctggcgtccacgggccccactgtaacgtgacgtgcccgcccggactccacggcgcggactgtgctcaggcctgcagctgccacgaggacacgtgcgacccggtcactggtgcctgccacctagaaaccaaccagcgcaagggcgtgatgggcgcgggcgcgctgctcgtcctgctcgtctgcctgctgctctcgctgctcggctgctgctgcgcttgccgcggcaaggaccctacgcgccgaccccgcccccgcagggagctttcgcttgggaggaagaaggcgccgcaccgactatgcgggcgcttcagtcgcatcagcatgaagctgccccggatcccgctccggaggcagaaactacccaaagtcgtagtggcccaccacgacctggataacacactcaactgcagcttcctggagccaccctcagggctggagcagccctcaccatcctggtcctctcgggcctccttctcctcgtttgacaccactgatgaaggccctgtgtactgtgtaccccatgaggaggcaccagcggagagccgggaccccgaagtccccactgtccctgccgaggcgccggcgccgtcccctgtgcccttgaccacgccagcctccgccgaggaggcgatacccctccccgcgtcctccgacagcgagcggtcggcgtccagcgtggaggggcccggaggggctctgtacgcgcgcgtggcccgacgcgaggcccggccggcccgggcccggggcgagattgggggcctgtcgctgtcgccatcgcccgagcgcaggaaaccgccgccacctgaccccgccaccaagcctaaggtgtcctggatccacggcaagcacagcgccgctgcagctggccgtgcgccctcaccaccgccgccaggctccgaggccgcgcccagccccagcaagaggaaacggacgcccagcgacaaatcggcgcatacggtcgaacacggcagcccccggacccgcgacccaacgccgcgccccccggggctgcccgaggaggcgacagccctcgctgcgccctcgccgcccagggcccgagcgcgcgccgcgccccggcctcttggagcccacggacgccggcggtcccccgcgaagcgcgccgaggctgcctccatgttggccgctgacgtgcgcggcaagactcgcagcctgggccgcgccgaggtggccctgggcgcgcagggccccagggaaaagccggcgcccccacagaaagccaagcgctccgtgccgccagcctcgcccgcccgcgcgcccccagcgaccgaaaccccggggcctgagaaggcggcgaccgacttgcccgcgcctgagaccccccggaagaagacccccatccagaagccgccgcgcaagaagagccgggaggcggcgggcgagctgggcagggcgggcgcacccaccctgtagcaggctgtggctcgtccgcgcgcagctccctcagcttcgcagcgccgcccgccaccccacacctcccacgctaccgggcacgggcggcctcctattggccgggcaccgcgcggctagcggaggttgcgtctcattggctcaggtcctgcagccgctcctggattggagcagtgtgctctggcgggaagggcccatcccgttggtcgaggcctgacaggcgcttagcgggcgactccctccccattggccgagttatggagcgctccgaccagacagcgtctcattggccaaagatgggagggttccgcttaaagaccgcctcttactggccaggagtggacttggttagggctaccttctcattggttgcagccagaggcacttctgcccgggctgcctctcccccgctagggcctggtgcctctggctggaggctccctcccttggccgtcccaatagagcccggggctacttccactggccaggctcccgggcatctggttgaccccagcctggggaggagggctggtctccgctcctcaggggcttagtccgtcccaccccttcccttccctggcgccccgggcccaggcccctcagctgtcagctggttttgatggcctcccactgccccacacgccgcgggacctccaggggcgactctagtggcctgaggagatgtatttataggcccccagcagggctgctcccccctcggccggtgccccaggatgggctcctcccggcgggggcttggccaaagctttcttaataaaatgcctttcccctc

SEQ ID NO: 1582 - protein, 870 aa, Homo sapiens
MEGAGPRGAGPARRRGAGGPPSPLLPSLLLLLLLWMLPDTVAPQELNPRGRNVCRAPGSQVPTCCAGWRQQGDECGIAVCEGNSTCSENEVCVRPGECRCRHGYFGANCDTKCPRQFWGPDCKELCSCHPHGQCEDVTGQCTCHARRWGARCEHACQCQHGTCHPRSGACRCEPGWWGAQCASACYCSATSRCDPQTGACLCHAGWWGRSCNNQCACNSSPCEQQSGRCQCRERTFGARCDRYCQCFRGRCHPVDGTCACEPGYRGKYCREPCPAGFYGLGCRRRCGQCKGQQPCTVAEGRCLTCEPGWNGTKCDQPCATGFYGEGCSHRCPPCRDGHACNHVTGKCTRCNAGWIGDRCETKCSNGTYGEDCAFVCADCGSGHCDFQSGRCLCSPGVHGPHCNVTCPPGLHGADCAQACSCHEDTCDPVTGACHLETNQRKGVMGAGALLVLLVCLLLSLLGCCCACRGKDPTRRPRPRRELSLGRKKAPHRLCGRFSRISMKLPRIPLRRQKLPKVVVAHHDLDNTLNCSFLEPPSGLEQPSPSWSSRASFSSFDTTDEGPVYCVPHEEAPAESRDPEVPTVPAEAPAPSPVPLTTPASAEEAIPLPASSDSERSASSVEGPGGALYARVARREARPARARGEIGGLSLSPSPERRKPPPPDPATKPKVSWIHGKHSAAAAGRAPSPPPPGSEAAPSPSKRKRTPSDKSAHTVEHGSPRTRDPTPRPPGLPEEATALAAPSPPRARARAAPRPLGAHGRRRSPAKRAEAASMLAADVRGKTRSLGRAEVALGAQGPREKPAPPQKAKRSVPPASPARAPPATETPGPEKAATDLPAPETPRKKTPIQKPPRKKSREAAGELGRAGAPTL

SEQ ID NO: 1583 - DNA, 2606 bp, Homo sapiens
ccccgcgcctcatggagggcgcagggccccggggggccgggccggcgcggcgccggggagccggggggccgccgtcaccgctgctgccgtcgctgctgctgctgctgctgctctggatgctgccggacaccgtggcgcctcaggaactgaaccctcgcggccgcaacgtgtgccgtgctcccggctcccaggtgcccacgtgctgcgctggctggaggcagcaaggggacgagtgtgggattgcggtgtgcgaaggcaactccacgtgctcagagaacgaggtgtgcgtgaggcctggcgagtgccgctgccgccacggctacttcggtgccaactgcgacaccaagtgcccgcgccagttctggggccccgactgcaaggagctgtgtagctgccacccacacgggcagtgcgaggacgtgacaggccagtgtacttgtcacgcgcggcgctggggcgcgcgctgcgagcatgcgtgccagtgccagcacggcacgtgccacccgcggagcggcgcgtgccgctgtgagcccggctggtggggcgcgcagtgcgccagcgcgtgctactgcagcgccacgtcgcgctgcgacccacagaccggcgcctgcctgtgccacgcaggctggtggggccgcagctgcaacaaccagtgcgcctgcaactcgtctccctgcgagcagcagagcggccgctgtcagtgccgcgagcgtacgttcggcgcgcgctgcgatcgctactgccagtgcttccgcggccgctgccaccctgtggacggcacgtgtgcctgcgagccgggctaccgcggcaagtactgtcgcgagccgtgccccgccggcttctacggcttgggctgtcgccgccggtgtggccagtgcaagggccagcagccgtgcacggtggccgagggccgctgcttgacgtgcgagcccggctggaacggaaccaagtgcgaccagccttgcgccaccggtttctatggcgagggctgcagccaccgctgtccgccatgccgcgacgggcatgcctgtaaccatgtcaccggcaagtgtacgcgctgcaacgcgggctggatcggcgaccggtgcgagaccaagtgtagcaatggcacttacggcgaggactgcgccttcgtgtgcgccgactgcggcagcggacactgcgacttccagtcggggcgctgcctgtgcagccctggcgtccacgggccccactgtaacgtgacgtgcccgcccggactccacggcgcggactgtgctcaggcctgcagctgccacgaggacacgtgcgacccggtcactggtgcctgccacctagaaaccaaccagcgcaagggcgtgatgggcgcgggcgcgctgctcgtcctgctcgtctgcctgctgctctcgctgctcggctgctgctgcgcttgccgcggcaaggaccctacgcgccgggagctttcgcttgggaggaagaaggcgccgcaccgactatgcgggcgcttcagtcgcatcagcatgaagctgccccggatcccgctccggaggcagaaactacccaaagtcgtagtggcccaccacgacctggataacacactcaactgcagcttcctggagccaccctcagggctggagcagccctcaccatcctggtcctctcgggcctccttctcctcgtttgacaccactgatgaaggccctgtgtactgtgtaccccatgaggaggcaccagcggagagccgggaccccgaagtccccactgtccctgccgaggcgccggcgccgtcccctgtgcccttgaccacgccagcctccgccgaggaggcgatacccctccccgcgtcctccgacagcgagcggtcggcgtccagcgtggaggggcccggaggggctctgtacgcgcgcgtggcccgacgcgaggcccggccggcccgggcccggggcgagattgggggcctgtcgctgtcgccatcgcccgagcgcaggaaaccgccgccacctgaccccgccaccaagcctaaggtgtcctggatccacggcaagcacagcgccgctgcagctggccgtgcgccctcaccaccgccgccaggctccgaggccgcgcccagccccagcaagaggaaacggacgcccagcgacaaatcggcgcatacggtcgaacacggcagcccccggacccgcgacccaacgccgcgccccccggggctgcccgaggaggcgacagccctcgctgcgccctcgccgcccagggcccgagcgcgcgccgcgcccggcctcttggagcccacggacgccggcggtcccccgcgaagcgcgccggctgcctccatgttggccgctgacgtgcgcggcaagactcgcagcctgggccgcgccgaggtggccctgggcgcgcagggccccagggaaaagccggcgcccccacagaaagccaagcgctccgtgccgccagcctcgcccgcccgcgcgcccccagcgaccgaaaccccggggcctgagaaggcggcgaccgacttgcccgcgcctgagaccccccggaagaagacccccatccagaagccgccgcgcaagaagagccgggaggcggcgggcgagctgggcagggcgggcgcacccaccctgtag

SEQ ID NO: 1584 - protein, 864 aa, Homo sapiens
MEGAGPRGAGPARRRGAGGPPSPLLPSLLLLLLLWMLPDTVAPQELNPRGRNVCRAPGSQVPTCCAGWRQQGDECGIAVCEGNSTCSENEVCVRPGECRCRHGYFGANCDTKCPRQFWGPDCKELCSCHPHGQCEDVTGQCTCHARRWGARCEHACQCQHGTCHPRSGACRCEPGWWGAQCASACYCSATSRCDPQTGACLCHAGWWGRSCNNQCACNSSPCEQQSGRCQCRERTFGARCDRYCQCFRGRCHPVDGTCACEPGYRGKYCREPCPAGFYGLGCRRRCGQCKGQQPCTVAEGRCLTCEPGWNGTKCDQPCATGFYGEGCSHRCPPCRDGHACNHVTGKCTRCNAGWIGDRCETKCSNGTYGEDCAFVCADCGSGHCDFQSGRCLCSPGVHGPHCNVTCPPGLHGADCAQACSCHEDTCDPVTGACHLETNQRKGVMGAGALLVLLVCLLLSLLGCCCACRGKDPTRRELSLGRKKAPHRLCGRFSRISMKLPRIPLRRQKLPKVVVAHHDLDNTLNCSFLEPPSGLEQPSPSWSSRASFSSFDTTDEGPVYCVPHEEAPAESRDPEVPTVPAEAPAPSPVPLTTPASAEEAIPLPASSDSERSASSVEGPGGALYARVARREARPARARGEIGGLSLSPSPERRKPPPPDPATKPKVSWIHGKHSAAAAGRAPSPPPPGSEAAPSPSKRKRTPSDKSAHTVEHGSPRTRDPTPRPPGLPEEATALAAPSPPRARARAAPGLLEPTDAGGPPRSAPAASMLAADVRGKTRSLGRAEVALGAQGPREKPAPPQKAKRSVPPASPARAPPATETPGPEKAATDLPAPETPRKKTPIQKPPRKKSREAAGELGRAGAPTL

SEQ ID NO: 1585 - DNA, 1464 bp, Homo sapiens
atggagaggtccgggcagcgtgttacaacgtgggactgtgaccagggcaagcactctgacagtgattaccgagaggatgggatggatctaggcagtgacgccggcagcagcagcagcagcagccgcgccagttcacagtccaactccaccaaagtgaccccttgctccgagtgcaaatcttcatcgtcgccggggggcagcctggacttggtgtctgccctggaggactatgaggagcccttcccggtctaccagaagaaggtgattgatgagtgggcgccggaggaggacggggaggaggaggaagaggaggacgagcgcgaccagcgagggtaccgggatgaccgctctccggcccgggaaccgggggacgtaagcgccaggacccgcagcggcggcggcgggggcaggagcgccaccaccgccatgccgcccccggtgcccaacggcaacctccaccagcacgacccccaggacctcaggcacaatggcaacgtggtggtggctggccggccgagctgttcccggggcccccgccgggcgatccaaaagccccagccggctgggggccggcgcagtggccgcggcccggcggctggggggctctgccttcagcccccagacggcgggacgtgcgtccccgaagagcccccggtgccacctatggattgggaggcgctggagaagcatctggccgggctgcagttccgggagcaggaggtacggaaccagggccaggcgaggaccaactccacctccgcacagaaaaatgagagagagtctatcagacagaagttggcacttggaagcttctttgatgatggcccaggaatttataccagctgtagcaaaagtgggaagccaagcctttcctcccgactgcagagtgggatgaacttgcagatatgctttgtcaacgacagtggcagtgataaggacagtgatgctgatgacagtaagactgaaaccagcttggacacccccttgtctcccatgagcaaacagagttcttcctattctgatagagacactactgaagaggagtctgaatccttggatgacatggacttccttacaaggcaaaagaaattgcaagctgaagccaaaatggcccttgccatggccaaaccaatggccaaaatgcaagtagaagtggagaaacagaacaggaaaaagtctcccgtcgctgatcttctgccacacatgcctcatataagtgaatgcttgatgaaaagaagtttaaaacccaccgacctgagagacatgactattgggcagctacaagtgatagtcaatgatctccattcccagatagaaagcttgaatgaagagttggtccagctgcttctcatccgagatgagctgcacacagagcaggatgccatgctggtggacattgaagacttgaccagacatgctgaaagtcagcagaagcacatggcagagaaaatgcctgcaaagtga

SEQ ID NO: 1586 - protein, 487 aa, Homo sapiens
MERSGQRVTTWDCDQGKHSDSDYREDGMDLGSDAGSSSSSSRASSQSNSTKVTPCSECKSSSSPGGSLDLVSALEDYEEPFPVYQKKVIDEWAPEEDGEEEEEEDERDQRGYRDDRSPAREPGDVSARTRSGGGGGRSATTAMPPPVPNGNLHQHDPQDLRHNGNVVVAGRPSCSRGPRRAIQKPQPAGGRRSGRGPAAGGLCLQPPDGGTCVPEEPPVPPMDWEALEKHLAGLQFREQEVRNQGQARTNSTSAQKNERESIRQKLALGSFFDDGPGIYTSCSKSGKPSLSSRLQSGMNLQICFVNDSGSDKDSDADDSKTETSLDTPLSPMSKQSSSYSDRDTTEEESESLDDMDFLTRQKKLQAEAKMALAMAKPMAKMQVEVEKQNRKKSPVADLLPHMPHISECLMKRSLKPTDLRDMTIGQLQVIVNDLHSQIESLNEELVQLLLIRDELHTEQDAMLVDIEDLTRHAESQQKHMAEKMPAK

SEQ ID NO: 1587 - DNA, 3225 bp, Homo sapiens
atgaagggaacctgtgttatagcatggctgttctcaagcctggggctgtggagactcgcccacccagaggcccagggtacgactcagtgccagagaaccgagcatccagtcatctcctataaagaaattggcccctggttacgggagttcagagcgaagaatgctgtggatttctcgcagttaacatttgacccaggacagaaagaacttgttgtaggagcaagaaactacctcttcaggttacagcttgaggatctgtctcttatccaggctgtggaatgggagtgtgatgaagctaccaaaaaggcctgttacagcaaaggcaaatcaaaggaggaatgtcagaactacatccgggtgcttctggtgggtggcgaccggttattcacctgtgggaccaatgcattcacgcctgtctgcaccaaccgctcgttgagcaacctgactgagatccatgatcagatcagtggcatggcccgctgtccctacagtccccagcacaattccacagcgctcctcacagctggtggggagctctatgctgctacagccatggattttccaggacgtgatcctgccatttaccgaagcctaggcattttacctcctctccgcacggcgcagtacaactccaaatggctcaatgagccaaactttgtgtcatcttatgacatcggaaattttacctacttctttttccgagaaaatgcagtagagcatgactgtgggaaaacagtgttctccagagctgcccgggtgtgcaagaacgatattggtgggcgcttcctgctggaagacacctggaccacattcatgaaggctcgcctgaactgctcccgtcctggggaagtccccttttactacaacgaattgcagagtactttcttcctgcctgagctggatttgatctatggcatctttaccaccaatgtgaacagcattgcggcctcagctgtgtgcgtcttcaacctgagcgccatcgcgcaggccttctctgggcccttcaagtaccaagaaaactcgcgctcggcctggctaccgtatcccaacccaaacccccacttccagtgtggcaccgtggaccagggcctgtacgtgaacctgaccgagagaaatctgcaggatgctcagaagttcattctgatgcatgaggtggtacagccagtgaccacagtgccctccttcatggaggacaatagccgcttttcccacgtggcagtcgacgtggtgcagggcagagaagcgctcgtccacatcatctatttggccacagattacggaaccattaagaaagtgcgggtacccctgaatcagacctcaagcagctgtttgctggaagagattgagctcttccctgagaggcggagggagcccatcaggagcctgcagatcctgcacagccagagtgtcctgttcgtgggcctgcgggagcacgtggtcaagatccccctgaagaggtgccagttctaccgcacacgcagcacctgcattggggcccaggacccttactgtggctgggatgtggtaatgaagaaatgcacaagcctggaggagagcctgagcatgacgcagtgggaacagagcatctctgcgtgtccgaccaggaatctcaccgtggatgggcactttggtgtgtggtctccgtggacgccttgcacgcacacagatggcagcgccgtgggatcctgcctctgtcgaacccgctcctgcgacagcccggccccgcagtgtggtggctggcagtgcgagggccctggcatggagatcgccaactgttccaggaacggaggctggactccctggacctcgtggtctccctgcagcactacctgtgggatcggcttccaggtgcggcagcgctcctgcagcaaccccactcccaggcacgggggccgggtgtgcgtgggacagaaccgcgaggaaagatactgcaatgaacatttgctatgtcccccacacatgttctggacaggctggggtccttgggaacggtgcacagcccaatgcgggggtggcattcaagctcgccgcaggatctgtgagaatgggcctgactgtgcaggctgcaatgtggagtaccagtcttgcaacaccaacccgtgtcctgagctgaagaagaccacgccctggacaccctggacacctgtcaacatctctgacaacggcggccactatgagcaacgattccgatacacatgcaaagcccgcctggctgatccgaatttgctggaagtgggaagacagagaatcgaaatgcggtactgttctagcgacggcaccagtggctgctccacagatgggctttctggggatttcctgcgtgctgggagatactctgcccacacggtcaacggggcttggtcagcctggacgtcgtggtcacagtgcagccgtgactgcagcaggggcattcggaaccggaagcgtgtttgcaacaaccccgaacccaagtatgggggaatgccttgccttggcccatctctggaataccaggaatgcaacattttgccctgcccagtggatggcgtgtggtcttgctggtccccctggacaaaatgttcagcaacatgcggcggtggacactatatgaggacccgctcttgctccaatccagccccggcctatggaggggacatctgcctggggctgcacacagaagaggcactctgcaacacgcagccctgcccagagagctggtcggagtggtcggactggtctgagtgtgaagcctctggcgtccaagtccgcgcccgccagtgcatcctcctgttccccatgggcagccagtgctccgggaacaccacggagagccggccgtgtgtgtttgactctaatttcatcccagaagtatctgtggcaagatccagtagcgtagaagagaaaaggtgtggagagttcaacatgttccacatgatcgccgtggggctgagcagctccatcctcggctgcctcctcaccctgctcgtctatacttactgccagcggtaccagcagcaatcccacgatgcgactgtcatccaccccgtctcacctgccccccttaataccagcataaccaaccacatcaacaaactggacaagtacgactcggtggaggccatcaaggcatttaacaaaaacaacttgatcctagaggaaagaaacaaatacttcaacccacatctcactgggaagacctattctaatgcctactttacagatctcaataattatgatgagtactaa

SEQ ID NO: 1588 - protein, 1074 aa, Homo sapiens
MKGTCVIAWLFSSLGLWRLAHPEAQGTTQCQRTEHPVISYKEIGPWLREFRAKNAVDFSQLTFDPGQKELVVGARNYLFRLQLEDLSLIQAVEWECDEATKKACYSKGKSKEECQNYIRVLLVGGDRLFTCGTNAFTPVCTNRSLSNLTEIHDQISGMARCPYSPQHNSTALLTAGGELYAATAMDFPGRDPAIYRSLGILPPLRTAQYNSKWLNEPNFVSSYDIGNFTYFFFRENAVEHDCGKTVFSRAARVCKNDIGGRFLLEDTWTTFMKARLNCSRPGEVPFYYNELQSTFFLPELDLIYGIFTTNVNSIAASAVCVFNLSAIAQAFSGPFKYQENSRSAWLPYPNPNPHFQCGTVDQGLYVNLTERNLQDAQKFILMHEVVQPVTTVPSFMEDNSRFSHVAVDVVQGREALVHIIYLATDYGTIKKVRVPLNQTSSSCLLEEIELFPERRREPIRSLQILHSQSVLFVGLREHVVKIPLKRCQFYRTRSTCIGAQDPYCGWDVVMKKCTSLEESLSMTQWEQSISACPTRNLTVDGHFGVWSPWTPCTHTDGSAVGSCLCRTRSCDSPAPQCGGWQCEGPGMEIANCSRNGGWTPWTSWSPCSTTCGIGFQVRQRSCSNPTPRHGGRVCVGQNREERYCNEHLLCPPHMFWTGWGPWERCTAQCGGGIQARRRICENGPDCAGCNVEYQSCNTNPCPELKKTTPWTPWTPVNISDNGGHYEQRFRYTCKARLADPNLLEVGRQRIEMRYCSSDGTSGCSTDGLSGDFLRAGRYSAHTVNGAWSAWTSWSQCSRDCSRGIRNRKRVCNNPEPKYGGMPCLGPSLEYQECNILPCPVDGVWSCWSPWTKCSATCGGGHYMRTRSCSNPAPAYGGDICLGLHTEEALCNTQPCPESWSEWSDWSECEASGVQVRARQCILLFPMGSQCSGNTTESRPCVFDSNFIPEVSVARSSSVEEKRCGEFNMFHMIAVGLSSSILGCLLTLLVYTYCQRYQQQSHDATVIHPVSPAPLNTSITNHINKLDKYDSVEAIKAFNKNNLILEERNKYFNPHLTGKTYSNAYFTDLNNYDEY

SEQ ID NO: 1589 - DNA, 4700 bp, Homo sapiens
atggccccctcggcctgggccatttgctggctgctagggggcctcctgctccatgggggtagctctggccccagccccggccccagtgtgccccgcctgcggctctcctaccgagacctcctgtctgccaaccgctctgccatctttctgggcccccagggctccctgaacctccaggccatgtacctagatgagtaccgagaccgcctctttctgggtggcctggacgccctctactctctgcggctggaccaggcatggccagatccccgggaggtcctgtggccaccgcagccaggacagagggaggagtgtgttcgaaagggaagagatcctttgacagagtgcgccaacttcgtgcgggtgctacagcctcacaaccggacccacctgctagcctgtggcactggggccttccagcccacctgtgccctcatcacagttggccaccgtggggagcatgtgctccacctggagcctggcagtgtggaaagtggccgggggcggtgccctcacgagcccagccgtccctttgccagcaccttcatagacggggagctgtacacgggtctcactgctgacttcctggggcgagaggccatgatcttccgaagtggaggtcctcggccagctctgcgttccgactctgaccagagtctcttgcacgacccccggtttgtgatggccgcccggatccctgagaactctgaccaggacaatgacaaggtgtacttcttcttctcggagacggtcccctcgcccgatggtggctcgaaccatgtcactgtcagccgcgtgggccgcgtctgcgtgaatgatgctgggggccagcgggtgctggtgaacaaatggagcactttcctcaaggccaggctggtctgctcggtgcccggccctggtggtgccgagacccactttgaccagctagaggatgtgttcctgctgtggcccaaggccgggaagagcctcgaggtgtacgcgctgttcagcaccgtcagtgccgtgttccagggcttcgccgtctgtgtgtaccacatggcagacatctgggaggttttcaacgggccctttgcccaccgagatgggcctcagcaccagtgggggccctatgggggcaaggtgcccttccctcgccctggcgtgtgccccagcaagatgaccgcacagccaggacggccttttggcagcaccaaggactacccagatgaggtgctgcagtttgcccgagcccaccccctcatgttctggcctgtgcggcctcgacatggccgccctgtccttgtcaagacccacctggcccagcagctacaccagatcgtggtggaccgcgtggaggcagaggatgggacctacgatgtcattttcctggggactgactcagggtctgtgctcaaagtcatcgctctccaggcagggggctcagctgaacctgaggaagtggttctggaggagctccaggtgtttaaggtgccaacacctatcaccgaaatggagatctctgtcaaaaggcaaatgctatacgtgggctctcggctgggtgtggcccagctgcggctgcaccaatgtgagacttacggcactgcctgtgcagagtgctgcctggcccgggacccatactgtgcctgggatggtgcctcctgtacccactaccgccccagccttggcaagcgccggttccgccggcaggacatccggcacggcaaccctgccctgcagtgcctgggccagagccaggaagaagaggcagtgggacttgtggcagccaccatggtctacggcacggagcacaatagcaccttcctggagtgcctgcccaagtctccccaggctgctgtgcgctggctcttgcagaggccaggggatgaggggcctgaccaggtgaagacggacgagcgagtcttgcacacggagcgggggctgctgttccgcaggcttagccgtttcgatgcgggcacctacacctgcaccactctggagcatggcttctcccagactgtggtccgcctggctctggtggtgattgtggcctcacagctggacaacctgttccctccggagccaaagccagaggagcccccagcccggggaggcctggcttccaccccacccaaggcctggtacaaggacatcctgcagctcattggcttcgccaacctgccccgggtggatgagtactgtgagcgcgtgtggtgcaggggcaccacggaatgctcaggctgcttccggagccggagccggggcaagcaggccaggggcaagagctgggcagggctggagctaggcaagaagatgaagagccgggtgcatgccgagcacaatcggacgccccgggaggtggaggccacgtagaagggggcagaggaggggtggtcaggatgggctggggggcccactagcagcccccagcatctcccacccacccagctagggcagaggggtcaggatgtctgtttgcctcttagagacaggtgtctctgcccccacaccgctactggggtctaatggaggggctgggttcttgaagcctgttccctgcccttctctgtgctcttagacccagctggagccagcaccctctggctgctggcagccccaagggatctgccatttgttctcagagatggcctggcttccgcaacacatttccgggtgtgcccagaggcaagagggttgggtggttctttcccagcctacagaacaatggccattctgagtgaccctcagagtgggtgtgtgggtgcgtctagggggtatcccggtagggggcctgcagggagccagagggtggaaatggcctctaagctagcaccccgtaagaagagcctacctgaccgacttggggagggaacacagaggtgttgggaaggtggagcaacaatgcacctcccctcctgtcgcgccgtgatatcttggtggctccctgccactgcccaccgcctcttctccatctgagaatcacggagaggtgtagataatctagaggcatagactgctagagcccccagggatctggggtggtcagggctcaggcttcactttgtaaaccaggtgggggcatctcacagcctgacttcccttccccaggccagggttgctgggatgcctgcccctcctgagaggaccccctccccattgtcaggctctccatgtccacgagcggggaggggtgggttctggggcattgttgtcccttgtgtctgtggactagagatagggtgggggagctggggaagggtgcaggcgggaagagtgggctgtctttcccagggtgatgcaagcatgccgcagccctggaggctgggaatgtggaggctctgtgagccctgcagccctcagaatcagggccagggatgcagaagattgagaggatatggagatggatagagggcaggagacccttaggatagattgtgggacccaggcaggaacaggtgtccacaagaactcaggatggcatcagttagctcagaagccacctggaagacccagtgtttccatctctggaatctctgttttatgctaaatggatttaggaagactgtttttcttttaagggggaaacaaggtagagaaaaggacgaagaagtgtaagtcccgctgattctcgggggtaaggctcggatggcaaggacgcgttctgcctgggcatgtaggggaggtgtttttgccatcaccagtttctcaggctggggagcacagaggggaggaggaggactaaatgaaaagttgttcccagcctgcacatgaacacattcatgacacacaaaactggctggaaggagataagagcactgggtttgagattccctccattaaaacaaccaagacaaagaaaggaggggaaaaaaagataaaaagcaagccagggttccctgccctattgaaactcaaacccagactgccttgggttttatctttcccttacccctggcacctccagagaactgggacctgaaatagtccctccgttctcccctttgaccatgtaataaatgaaccagaagcactgagattaacctatcaacgccctgagaagccttccagcctgcggtgctgtctgctgggaggtcagctggtcaaggcagaggaggagaggaggaaaggatgggggctgaagagcagaagggaggggagacagaggggattaaagaggggaggagagagtgcagagctccaggaaagggtatcagagctgcagccagctctgccctctaccctagggaggccagaaagacacaaacagccctccgggcctttacgctggactctggcttggcaggctccaggcagggtcctctgggaagttactctagaaaacgaagggaggaggagcacaagatcctcagcaacgaacacctgcacttagaaaaagtggacagcttctgccaaccacaccctacccatggtactgtatgctattaactcctggaaacgccccgtaaatgcgagttgtttttgtatttgtgtgttgagatgggccttgtggtttctctgtactcagagcacatttcttgtaattactattgttatttttattgtcatgactgcccctgagctctggtgagaaaagctgaatttacaaggaaagggatgaagttaatatttgcatcacataattatatcattactgtgtatctgtgtattgtactaaatggactgatgctgcgcacatgagctgaaaatgaagagccctcccatcc

SEQ ID NO: 1590 - protein, 782 aa, Homo sapiens
MAPSAWAICWLLGGLLLHGGSSGPSPGPSVPRLRLSYRDLLSANRSAIFLGPQGSLNLQAMYLDEYRDRLFLGGLDALYSLRLDQAWPDPREVLWPPQPGQREECVRKGRDPLTECANFVRVLQPHNRTHLLACGTGAFQPTCALITVGHRGEHVLHLEPGSVESGRGRCPHEPSRPFASTFIDGELYTGLTADFLGREAMIFRSGGPRPALRSDSDQSLLHDPRFVMAARIPENSDQDNDKVYFFFSETVPSPDGGSNHVTVSRVGRVCVNDAGGQRVLVNKWSTFLKARLVCSVPGPGGAETHFDQLEDVFLLWPKAGKSLEVYALFSTVSAVFQGFAVCVYHMADIWEVFNGPFAHRDGPQHQWGPYGGKVPFPRPGVCPSKMTAQPGRPFGSTKDYPDEVLQFARAHPLMFWPVRPRHGRPVLVKTHLAQQLHQIVVDRVEAEDGTYDVIFLGTDSGSVLKVIALQAGGSAEPEEVVLEELQVFKVPTPITEMEISVKRQMLYVGSRLGVAQLRLHQCETYGTACAECCLARDPYCAWDGASCTHYRPSLGKRRFRRQDIRHGNPALQCLGQSQEEEAVGLVAATMVYGTEHNSTFLECLPKSPQAAVRWLLQRPGDEGPDQVKTDERVLHTERGLLFRRLSRFDAGTYTCTTLEHGFSQTVVRLALVVIVASQLDNLFPPEPKPEEPPARGGLASTPPKAWYKDILQLIGFANLPRVDEYCERVWCRGTTECSGCFRSRSRGKQARGKSWAGLELGKKMKSRVHAEHNRTPREVEAT

SEQ ID NO: 1591 - DNA, 5554 bp, Homo sapiens
ggcgtggggggagcagatgccgctggctgccagcgggacgccggcgagcagagcgcagccgcgagggaggcgcgagggaggcgagccggagcccgagcactagcagcagccggagtcggcgtaaagcacccgggcgcagccggagccggtgccgcagctgcgatggccgtggccgtggggagaccgtctaatgaagagcttcgaaacttgtctttgtctggccatgtgggatttgacagcctccctgaccagctggtcaacaagtctacttctcaaggattctgtttcaacatcctttgtgttggtgagacaggcattggcaaatccacgttaatggacactttgttcaacaccaaatttgaaagtgacccagctactcacaatgaaccaggtgttcggttaaaagccagaagttatgagcttcaggaaagcaatgtacggctgaagttaaccattgttgacaccgtgggatttggagaccagataaataaagatgacagctataagccgatagtagaatatattgatgcccagttcgaggcctacctgcaagaggaattgaagattaaacgttctctcttcaactaccatgacacgaggatccatgcctgcctctactttattgcccctactggacattcactaaagtccctggatctggtcaccatgaaaaagctggacagtaaggtgaacatcattccaataattgcaaaagctgacaccattgccaagaatgaactgcacaaattcaagagtaagatcatgagtgaactggtcagcaatggggtccagatatatcagtttcccactgatgaagaaacggtggcagagattaacgcaacaatgagtgtccatctcccatttgcagtggttggcagcaccgaagaggtgaagattggcaacaagatggcaaaggccaggcagtacccctggggtgtggtgcaggttgagaatgaaaatcattgcgattttgtgaaacttcgagagatgctgatccgcgtgaacatggaggacttgcgagagcagactcacacccgccactatgaattgtaccgacgctgtaagcttgaagagatggggttcaaggacactgaccctgacagcaaacccttcagtcttcaggagacatatgaagcaaaaaggaatgaattcctgggagaactgcagaagaaagaagaagaaatgagacaaatgtttgttatgagagtgaaggagaaagaagctgaacttaaggaggcagagaaagagcttcacgagaagtttgaccttctaaagcggacacaccaagaagaaaagaagaaagtggaagacaagaagaaggagcttgaggaggaggtgaacaacttccagaagaagaaagcagcggctcagttactacagtcccaggcccagcaatctggggcccagcaaaccaagaaagacaaggataagaaaaatgcaagcttcacataaagcctggcaagccaaggatgttcccgcattcacctgcttttgcagtaatatcgtatctctgccatgtgtgttctttagttttattttattttattttatttttttacccttcctcaaacaccagtaactattattaactcgttttgctgaatgttgttgggtggtagaaaatgatagaacaagggaataaccgcgaatgctctgtgcagctggactctgtttccggaaagtaaatgatttgctttttatgcctgttctgaatggcagcacgaagcaggcctgttacttgtatgtcgctttggacagaggaaagtggggtaaaatgctacctgtacgtctgacatgaaaacttctcaccgcctcagcagctgaactaaaaacctgaatagccatgacaagagtttgcattttcttgatgattcatctccatgagtgcacaatccctgaactcactgtcttttctccacacttgtcctaagccaaggtagatttgtacgtagacagactggtgagcaagcattatattttatttttacccttgcatgacattttcattttaatcaataacattatttggcctgagcttgtgggtctgttcagactgtctcctctcatggtttgaaactgcatctgaatgcctgccttcaatcctggccaagttggagtagactggtatgagaaaactatgattagttcacatttactggtgcatccttgatcctctcacagatagaggtcttaaaggttggatcatgtaacattgcttagtagaagaatcttcttctaaggatgatgggctttctacagcctgcttaccactaacagtaaggaatctttcataaacacacctcagtttgttcccagtgggcttagagggaggacctgatgactgattccaggatacttgtacttctaataacatttttcatgaatcatgagaaaatttccacagatacttcccttagaaaatttgctataaactctgtatcattggtagcacaaatttgagcgaggccttgtcaattttaaggtggaaataggaaggaccacaacatgacccgtaagtcaagaaggtagacatttcatatccagcttccttgcttagtctcctttcagtatttggcaataaaagaaagaagaaatagaacagctgaagtctcaaatcattgtctggaattttcctcaccttggctagctccacctgctctttgtctaaggcccttgcctcatcagggattagaactggcccatatgccagaacctgtactaaatgcctaatttgtatggaagagtgcatatttaatctcttttctatactgctcctttctgatgcttatcctttcatctgtgtgattgttttttcccctctactaacaagatcctcccagctttctctctacatgtagaaaggataacatttctcatgaacccactgcccctctgcattttcctcactggttagagattaagtaaataggatagaatatgctgcgtctcccctgacacacactttcttttttgaatgagcaagtctccattttgatttcagcaaagattttttctccttttctttgtcctcaaccatacttagaggaaagaaggaatggtcttccatgaactgattatgcttaattaagcaaagtaaggaaattagtttcatggaagcctaaacaaagctggaatagaaactacacactagacacagcagtagtcatagtcttcacaggtttaggagctactggaccaacattcttgtttttgcttttgtttttttaaataattctagtctggagctaactgtggagcagccaaatagtagctggcatgttgattcaaaccatgggctgaatttgctcataggctgtgcatcagacaaaagcttgaatatttgtgttgtatgcttgttccaaccaccgcttgtgtgagcatttttgtggcttgtacagaaagtacacttttaaattgtctcttgcatcactaaaatttttttaaaatgagcataacaacgaaaggcatccagctgactttttgattccaagattattgattggattgacttttttgcattaaatttttcccagcaaaataaatcatatggcgagtcagggaataaaaagtcaaaagaaacaaatagaagcttttttttttaaaaaatgtattgcttctgaacttttttctgccactgctccctagccctgtttagtttgttattgctgcttttcttttttctttctgtatctatgcctttttttcacagtagtccttggctctgcacggaataaatgataccctcaaatctaattggatgtgctttcgcctttgcatgtaagtacggtagtaagaaacctttgagatctttctgacttttcaaaattagagaaagcaaatgggatggatagattttttttttcttttcaaggggggcaggaaggtaatggtttgagtagcctttgtttaaaaaaaagactaaatatatttaaaaggccacatttatatttttttcacaagaaccacataataaattccacttcttgacctgaatttggaaatccgaaattactaatccaggccaggtgtggtggctcatgcctgtaatcccagcactttgagaggccgaggtgggcagatcacttgaggcctggagttcaagaccaccttggcgaacacggtgaaaccccgtctctacaaaaaatacaaaaattagccaggcgtggtggcacgtgcctgtagtcccagctacttgggaggctaagtcaggagaattgcttgaacttgggagatggaggttgcagtgagccaagattgcaccactgcattccaacctgggtgatgaagtgagactctccaaaaaaaaaaaagaaattattaatccctgcctgtgctctacatagcctcatgggcatcattggatagctcagagggcccttgattctggcaaggcaaataaagccagaatgagaaattaccatcttctactagagaaaaccaagagaaaaatttttatgctaggatgcctttatgaccacttaattttttaatcttagtttaatggtctctccctggtgctaactgctgacagtggccacctcttttttggggattgaggggcctacataactagctggccttaccccatatcttttgttcaaacataataccatctttttgcttcttctgaactttagatctccataacacatgtactgtagaatgtgatggaaaagcattgatgagaatttattggcagttcagattgtgttttcccaacttaggctctttattaattggttaaggttttctccaaaaagggcatttcaacaatgggaattatttaatgtaacagtgggcacagattacttatcttccttctctgctttgtgactcaccagcagtaacacacacaatccacatcttgtgcacctcaaatgaacagacttggtttccttgctttcttgacatttccatgactgtttcacatacaaactattgggtgaggtttttcagctgttaccgacccacgtcctgctgtctctgtgtggtcctacaaaaactgtccattcccacccctttgctttgccatttgcaagagtctggaattgtcaggtctcagcttcgaaaagtcctggttccactgacaggacacattctttagtgggaattaagacctacaaagtctagtttgtatgtaggtatgaagggaattttttaaataaattgaaaagctgtgaacagcattagaactttgtctatttcttaattttaaaatatgctgatatgccttaaactgtagttgtagatccttgtcattttgctgtttgaaaataaccaatgtgttttctaaaactgtcgtgtaatctactttcattgttaatgcagaattgtcatatatgtaagctgcatgttagacatttgtcttttttaaactaaagtaattgtattgatgtgaagcatatcattttttcaaatatgaaagtgatcacttagcaacatgcttggtaatttggcatctgttaaggtaggagagtggtgaacagataatctatgcatatatcactagtgccaagacataaagcgggggaaaatatatttttacccaaacatt

SEQ ID NO: 1592 - protein, 452 aa, Homo sapiens
RALAAAGVGVKHPGAAGAGAAAAMAVAVGRPSNEELRNLSLSGHVGFDSLPDQLVNKSTSQGFCFNILCVGETGIGKSTLMDTLFNTKFESDPATHNEPGVRLKARSYELQESNVRLKLTIVDTVGFGDQINKDDSYKPIVEYIDAQFEAYLQEELKIKRSLFNYHDTRIHACLYFIAPTGHSLKSLDLVTMKKLDSKVNIIPIIAKADTIAKNELHKFKSKIMSELVSNGVQIYQFPTDEETVAEINATMSVHLPFAVVGSTEEVKIGNKMAKARQYPWGVVQVENENHCDFVKLREMLIRVNMEDLREQTHTRHYELYRRCKLEEMGFKDTDPDSKPFSLQETYEAKRNEFLGELQKKEEEMRQMFVMRVKEKEAELKEAEKELHEKFDLLKRTHQEEKKKVEDKKKELEEEVNNFQKKKAAAQLLQSQAQQSGAQQTKKDKDKKNASFT

SEQ ID NO: 1593 - DNA, 4400 bp, Homo sapiens
gcgggcacgccgccgcctgcgcggttccgggtgctcccggcgcggcgctgcccagggcacacttgaccgaggtcgggctgcggggaaaggcgggtctggggagaaccccgagagacgcggcgtcctccaactcctcctccttctcctcgcggccgccgaagccacagcccgagcccgagcccgagcccgagccggcgccaccgcgcccccggccatggcttttgccaatttccgccgcatcctgcgcctgtctaccttcgagaagagaaagtcccgcgaatatgagcacgtccgccgcgacctggaccccaacgaggtgtgggagatcgtgggcgagctgggcgacggcgccttcggcaaggtttacaaggccaagaataaggagacgggtgctttggctgcggccaaagtcattgaaaccaagagtgaggaggagctggaggactacatcgtggagattgagatcctggccacctgcgaccacccctacattgtgaagctcctgggagcctactatcacgacgggaagctgtggatcatgattgagttctgtccagggggagccgtggacgccatcatgctggagctggacagaggcctcacggagccccagatacaggtggtttgccgccagatgctagaagccctcaacttcctgcacagcaagaggatcatccaccgagatctgaaagctggcaacgtgctgatgaccctcgagggagacatcaggctggctgactttggtgtgtctgccaagaatctgaagactctacagaaacgagattccttcatcggcacgccttactggatggcccccgaggtggtcatgtgtgagaccatgaaagacacgccctacgactacaaagccgacatctggtccctgggcatcacgctgattgagatggcccagatcgagccgccacaccacgagctcaaccccatgcgggtcctgctaaagatcgccaagtcggaccctcccacgctgctcacgccctctaagtggtctgtagagttccgtgacttcctgaagatagccctggataagaacccagaaacccgacccagtgccgcgcagctgctggagcatcccttcgtcagcagcatcaccagtaacaaggctctgcgggagctggtggctgaggccaaggccgaggtgatggaagagatcgaagacggccgggatgagggggaagaggaggacgccgtggatgccgcctccaccctggagaaccatactcagaactcctctgaggtgagtccgccaagcctcaatgctgacaagcctctcgaggagtcaccttccaccccgctggcacccagccagtctcaggacagtgtgaatgagccctgcagccagccctctggggacagatccctccaaaccaccagtcccccagtcgtggcccctggaaatgagaacggcctggcagtgcctgtgcccctgcggaagtcccgacccgtgtcaatggatgccagaattcaggtagcccaggagaagcaagttgctgagcagggtggggacctcagcccagcagccaacagatctcaaaaggccagccagagccggcccaacagcagcgccctggagaccttgggtggggagaagctggccaatggcagcctggagccacctgcccaggcagctccagggccttccaagagggactcggactgcagcagcctctgcacctctgagagcatggactatggtaccaatctctccactgacctgtcgctgaacaaagagatgggctctctgtccatcaaggacccgaaactgtacaaaaaaaccctcaagcggacacgcaaatttgtggtggatggtgtggaggtgagcatcaccacctccaagatcatcagcgaagatgagaagaaggatgaggagatgagatttctcaggcaagcctgggaagggccaccaatggaactccgagagcttcggctgctccagaaagaagagcatcggaaccagacccagctgagtaacaagcatgagctgcagctggagcaaatgcataaacgttttgaacaggaaatcaacgccaagaagaagttctttgacacggaattagagaacctggagcgtcagcaaaagcagcaagtggagaagatggagcaagaccatgccgtgcgccgccgggaggaggccaggcggatccgcctggagcaggatcgggactacaccaggttccaagagcagctcaaactgatgaagaaagaggtgaagaacgaggtggagaagctcccccgacagcagcggaaggaaagcatgaagcagaagatggaggagcacacgcagaaaaagcagcttcttgaccgggactttgtagccaagcagaaggaggacctggagctggccatgaagaggctcaccaccgacaacaggcgggagatctgtgacaaggagcgcgagtgcctcatgaagaagcaggagctccttcgagaccgggaagcagccctgtgggagatggaagagcaccagctgcaggagaggcaccagctggtgaagcagcagctcaaagaccagtacttcctccagcggcacgagctgctgcgcaagcatgagaaggagcgggagcagatgcagcgctacaaccagcgcatgatagagcagctgaaggtgcggcagcaacaggaaaaggcgcggctgcccaagatccagaggagtgagggcaagacgcgcatggccatgtacaagaagagcctccacatcaacggcgggggcagcgcagctgagcagcgtgagaagatcaagcagttctcccagcaggaggagaagaggcagaagtcggagcggctgcagcaacagcagaaacacgagaaccagatgcgggacatgctggcgcagtgtgagagcaacatgagcgagctgcagcagctgcagaatgaaaagtgccacctcctggtagagcacgaaacccagaaactgaaggccctggatgagagccataaccagaacctgaaggaatggcgggacaagcttcggccgcgcaagaaggctctggaagaggatctgaaccagaagaagcgggagcaggagatgttcttcaagctgagcgaggaggcggagtgcccaaacccctccaccccaagcaaggccgccaagttcttcccctacagttctgcggatgcttcttaacaaccgcccggggctgtggctggcagcttggtgggccccagggccttctccttcattctctgtgaacatgtaactcaggaccccttttccctcttgcgtctgtgccagctcaaatccagcccctcgccctgtgccaccccaactgtgcctgatagacctgccccagcgttcctgacttcttgctggcctgtggagggtgaggtgtaattatttgtcacctgaacctaatgtatattctccttgagccccagatcccttcaagctggaagggatggggctgttggtggggtcagggtccaagaggaatgggtgttctgtggcctcgagtcctctcctgtttgcgaaaataccagttttgctctctgtgggacaaagcactgctgatgaagtccccgtgggctcatccgggctggaattcttggtttttcagccattccctgcagagtcactcaatcatcaagtccctcacagccatttctgttcccagaggagccaggcctgcagctggctgctcaggagatggcctcattcctcctgttctcccagtttgctttccacttaagacaaagccttgtctatgtggggggcggggaccggggaaagagggaggctgaaatgtttattctgcttctcccgtgtttcatgccatctcgcgtcccccttcctgcacatgggtgtgaatgcacacacatacgcgtacacacaggacttggtctgctggcctggcctcttctgcccaggtgggttggaacacgtttgctgcctgagcctgtgccactgagcatgttaggtggagcagttggtgtggcacgtgcggggtgttggcaccggaggcatggaaaagcacaggctgtactgccaggctgcgatgcgtgctggcccccgcacaggctcctgtgtgcagggactgattcctcagcacacgaggcttccacaacccagtctgctccatagcactctggcccaccctgtctgcaggtgaaacaggagggctgtttgcctctgccccatccccccgactgtgttcaggagtcccaccttgcatttcagacctgggctggcagtctgttggacttctcttcaggaagaaaaagcatcagggggaaatggaatgcccctgccccaggaacatggcagaagcacaggttctgtacctcagatggactcctgctgggccttcggggtctcagttggcttcccccagattctgattctacagctgcagaatgtatataacgcaataaaagcaaatgtttgaacc

SEQ ID NO: 1594 - protein, 974 aa, Homo sapiens
MAFANFRRILRLSTFEKRKSREYEHVRRDLDPNEVWEIVGELGDGAFGKVYKAKNKETGALAAAKVIETKSEEELEDYIVEIEILATCDHPYIVKLLGAYYHDGKLWIMIEFCPGGAVDAIMLELDRGLTEPQIQVVCRQMLEALNFLHSKRIIHRDLKAGNVLMTLEGDIRLADFGVSAKNLKTLQKRDSFIGTPYWMAPEVVMCETMKDTPYDYKADIWSLGITLIEMAQIEPPHHELNPMRVLLKIAKSDPPTLLTPSKWSVEFRDFLKIALDKNPETRPSAAQLLEHPFVSSITSNKALRELVAEAKAEVMEEIEDGRDEGEEEDAVDAASTLENHTQNSSEVSPPSLNADKPLEESPSTPLAPSQSQDSVNEPCSQPSGDRSLQTTSPPVVAPGNENGLAVPVPLRKSRPVSMDARIQVAQEKQVAEQGGDLSPAANRSQKASQSRPNSSALETLGGEKLANGSLEPPAQAAPGPSKRDSDCSSLCTSESMDYGTNLSTDLSLNKEMGSLSIKDPKLYKKTLKRTRKFVVDGVEVSITTSKIISEDEKKDEEMRFLRQAWEGPPMELRELRLLQKEEHRNQTQLSNKHELQLEQMHKRFEQEINAKKKFFDTELENLERQQKQQVEKMEQDHAVRRREEARRIRLEQDRDYTRFQEQLKLMKKEVKNEVEKLPRQQRKESMKQKMEEHTQKKQLLDRDFVAKQKEDLELAMKRLTTDNRREICDKERECLMKKQELLRDREAALWEMEEHQLQERHQLVKQQLKDQYFLQRHELLRKHEKEREQMQRYNQRMIEQLKVRQQQEKARLPKIQRSEGKTRMAMYKKSLHINGGGSAAEQREKIKQFSQQEEKRQKSERLQQQQKHENQMRDMLAQCESNMSELQQLQNEKCHLLVEHETQKLKALDESHNQNLKEWRDKLRPRKKALEEDLNQKKREQEMFFKLSEEAECPNPSTPSKAAKFFPYSSADAS

SEQ ID NO: 1595 - DNA, 1971 bp, Homo sapiens
aggaaacggtttattaggagggagtggtggagctgggccaggcaggaagacgctggaataagaaacatttttgctccagcccccatcccagtcccgggaggctgccgcgccagctgcgccgagcgagcccctccccggctccagcccggtccggggccgcgcccggaccccagcccgccgtccagcgctggcggtgcaactgcggccgcgcggtggaggggaggtggccccggtccgccgaaggctagcgccccgccacccgcagagcgggcccagagggaccatgaccttgggctcccccaggaaaggccttctgatgctgctgatggccttggtgacccagggagaccctgtgaagccgtctcggggcccgctggtgacctgcacgtgtgagagcccacattgcaaggggcctacctgccggggggcctggtgcacagtagtgctggtgcgggaggaggggaggcacccccaggaacatcggggctgcgggaacttgcacagggagctctgcagggggcgccccaccgagttcgtcaaccactactgctgcgacagccacctctgcaaccacaacgtgtccctggtgctggaggccacccaacctccttcggagcagccgggaacagatggccagctggccctgatcctgggccccgtgctggccttgctggccctggtggccctgggtgtcctgggcctgtggcatgtccgacggaggcaggagaagcagcgtggcctgcacagcgagctgggagagtccagtctcatcctgaaagcatctgagcagggcgacagcatgttgggggacctcctggacagtgactgcaccacagggagtggctcagggctccccttcctggtgcagaggacagtggcacggcaggttgccttggtggagtgtgtgggaaaaggccgctatggcgaagtgtggcggggcttgtggcacggtgagagtgtggccgtcaagatcttctcctcgagggatgaacagtcctggttccgggagactgagatctataacacagtgttgctcagacacgacaacatcctaggcggagaggccagctacatgacctcccgcaactcgagcacgcagctgtggctcatcacgcactaccacgagcacggctccctctacgactttctgcagagacagacgctggagccccatctggctctgaggctagctgtgtccgcggcatgcggcctggcgcacctgcacgtggagatcttcggtacacagggcaaaccagccattgcccaccgcgacttcaagagccgcaatgtgctggtcaagagcaacctgcagtgttgcatcgccgacctgggcctggctgtgatgcactcacagggcagcgattacctggacatcggcaacaacccgagagtgggcaccaagcggtacatggcacccgaggtgctggacgagcagatccgcacggactgctttgagtcctacaagtggactgacatctgggcctttggcctggtgctgtgggagattgcccgccggaccatcgtgaatggcatcgtggaggactatagaccacccttctatgatgtggtgcccaatgaccccagctttgaggacatgaagaaggtggtgtgtgtggatcagcagacccccaccatccctaaccggctggctgcagacccggtcctctcaggcctagctcagatgatgcgggagtgctggtacccaaacccctctgcccgactcaccgcgctgcggatcaagaagacactacaaaaaattagcaacagtccagagaagcctaaagtgattcaatagcccaggagcacctgattcctttctgcctgcagggggctgggggggtggggggcagtggatggtgccctatctgggtagaggtagtgtgagtgtggtgtgtgctggggatgggcagctgcgcctgcctgctcggcccccagcccacccagccaaaaatacagctgggctgaaacctg

SEQ ID NO: 1596 - protein, 503 aa, Homo sapiens
MTLGSPRKGLLMLLMALVTQGDPVKPSRGPLVTCTCESPHCKGPTCRGAWCTVVLVREEGRHPQEHRGCGNLHRELCRGRPTEFVNHYCCDSHLCNHNVSLVLEATQPPSEQPGTDGQLALILGPVLALLALVALGVLGLWHVRRRQEKQRGLHSELGESSLILKASEQGDSMLGDLLDSDCTTGSGSGLPFLVQRTVARQVALVECVGKGRYGEVWRGLWHGESVAVKIFSSRDEQSWFRETEIYNTVLLRHDNILGGEASYMTSRNSSTQLWLITHYHEHGSLYDFLQRQTLEPHLALRLAVSAACGLAHLHVEIFGTQGKPAIAHRDFKSRNVLVKSNLQCCIADLGLAVMHSQGSDYLDIGNNPRVGTKRYMAPEVLDEQIRTDCFESYKWTDIWAFGLVLWEIARRTIVNGIVEDYRPPFYDVVPNDPSFEDMKKVVCVDQQTPTIPNRLAADPVLSGLAQMMRECWYPNPSARLTALRIKKTLQKISNSPEKPKVIQ

SEQ ID NO: 1597 - DNA, 2368 bp, Homo sapiens
agcatacgccgagccggtctttgagcgctaacgtctttctgtctccccgcggtggtgatgacggtgaaaactgaggctgctaagggcaccctcacttactccaggatgaggggcatggtggcaattctcatcgctttcatgaagcagaggaggatgggtctgaacgactttattcagaagattgccaataactcctatgcatgcaaacaccctgaagttcagtccatcttgaagatctcccaacctcaggagcctgagcttatgaatgccaacccttctcctccaccaagtccttctcagcaaatcaaccttggcccgtcgtccaatcctcatgctaaaccatctgactttcacttcttgaaagtgatcggaaagggcagttttggaaaggttcttctagcaagacacaaggcagaagaagtgttctatgcagtcaaagttttacagaagaaagcaatcctgaaaaagaaagaggagaagcatattatgtcggagcggaatgttctgttgaagaatgtgaagcaccctttcctggtgggccttcacttctctttccagactgctgacaaattgtactttgtcctagactacattaatggtggagagttgttctaccatctccagagggaacgctgcttcctggaaccacgggctcgtttctatgctgctgaaatagccagtgccttgggctacctgcattcactgaacatcgtttatagagacttaaaaccagagaatattttgctagattcacagggacacattgtccttactgacttcggactctgcaaggagaacattgaacacaacagcacaacatccaccttctgtggcacgccggagtatctcgcacctgaggtgcttcataagcagccttatgacaggactgtggactggtggtgcctgggagctgtcttgtatgagatgctgtatggcctgccgcctttttatagccgaaacacagctgaaatgtacgacaacattctgaacaagcctctccagctgaaaccaaatattacaaattccgcaagacacctcctggagggcctcctgcagaaggacaggacaaagcggctcggggccaaggatgacttcatggagattaagagtcatgtcttcttctccttaattaactgggatgatctcattaataagaagattactcccccttttaacccaaatgtgagtgggcccaacgacctacggcactttgaccccgagtttaccgaagagcctgtccccaactccattggcaagtcccctgacagcgtcctcgtcacagccagcgtcaaggaagctgccgaggctttcctaggcttttcctatgcgcctcccacggactctttcctctgaaccctgttagggcttggttttaaaggattttatgtgtgtttccgaatgttttagttagccttttggtggagccgccagctgacaggacatcttacaagagaatttgcacatctctggaagcttagcaatcttattgcacactgttcgctggaagctttttgaagagcacattctcctcagtgagctcatgaggttttcatttttattcttccttccaacgtggtgctatctctgaaacgagcgttagagtgccgccttagacggaggcaggagtttcgttagaaagcggacgctgttctaaaaaaggtctcctgcagatctgtctgggctgtgatgacgaatattatgaaatgtgccttttctgaagagattgtgttagctccaaagcttttcctatcgcagtgtttcagttctttattttcccttgtggatatgctgtgtgaaccgtcgtgtgagtgtggtatgcctgatcacagatggattttgttataagcatcaatgtgacacttgcaggacactacaacgtgggacattgtttgtttcttccatatttggaagataaatttatgtgtagacttttttgtaagatacggttaataactaaaatttattgaaatggtcttgcaatgactcgtattcagatgcttaaagaaagcattgctgctacaaatatttctatttttagaaagggtttttatggaccaatgccccagttgtcagtcagagccgttggtgtttttcattgtttaaaatgtcacctgtaaaatgggcattatttatgtttttttttttgcattcctgataattgtatgtattgtataaagaacgtctgtacattgggttataacactagtatatttaaacttacaggcttatttgtaatgtaaaccaccattttaatgtactgtaattaacatggttataatacgtacaatccttccctcatcccatcacacaactttttttgtgtgtgataaactgattttggtttgcaataaaaccttgaaaaatattt

SEQ ID NO: 1598 - protein, 431 aa, Homo sapiens
MTVKTEAAKGTLTYSRMRGMVAILIAFMKQRRMGLNDFIQKIANNSYACKHPEVQSILKISQPQEPELMNANPSPPPSPSQQINLGPSSNPHAKPSDFHFLKVIGKGSFGKVLLARHKAEEVFYAVKVLQKKAILKKKEEKHIMSERNVLLKNVKHPFLVGLHFSFQTADKLYFVLDYINGGELFYHLQRERCFLEPRARFYAAEIASALGYLHSLNIVYRDLKPENILLDSQGHIVLTDFGLCKENIEHNSTTSTFCGTPEYLAPEVLHKQPYDRTVDWWCLGAVLYEMLYGLPPFYSRNTAEMYDNILNKPLQLKPNITNSARHLLEGLLQKDRTKRLGAKDDFMEIKSHVFFSLINWDDLINKKITPPFNPNVSGPNDLRHFDPEFTEEPVPNSIGKSPDSVLVTASVKEAAEAFLGFSYAPPTDSFL

SEQ ID NO: 1599 - DNA, 2114 bp, Homo sapiens
gtagttaggagtctggagtcgtgagccggagtcagaactgcgtctcgcgacccaggcgcgggtttccagaggacagccaacaagcgatgctgccgccgccgtttcctgattggttgtgggtggctacctcttcgttctgattggccgctagtgagcaagatgctgagcaagggtctgaagcggaaacgggaggaggaggaggagaaggaacctctggcagtcgactcctggtggctagatcctggccacacagcggtggcacaggcacccccggccgtggcctctagctccctctttgacctctcagtgctcaagctccaccacagcctgcagcagagtgagccggacctgcggcacctggtgctggtcgtgaacactctgcggcgcatccaggcgtccatggcacccgcggctgccctgccacctgtgcctagcccacctgcagcccccagtgtggctgacaacttactggcaagctcggacgctgccctttcagcctccatggccagcctcctggaggacctcagccacattgagggcctgagtcaggctccccaacccttggcagacgaggggccaccaggccgtagcatcgggggagcagcgcccagcctgggtgccttggacctgctgggcccagccactggctgtctactggacgatgggcttgagggcctgtttgaggatattgacacctctatgtatgacaatgaactttgggcaccagcctctgagggcctcaaaccaggccctgaggatgggccgggcaaggaggaagctccggagctggacgaggccgaattggactacctcatggatgtgctggtgggcacacaggcactggagcgaccgccggggccagggcgctgagccctcgtgctggaatggttgtctggtatctgaactgagcctgctggctggaccaactgtcctcgaaaagacacagctggcttccctagtacagagaacagggcttgggccactttggagagacagaatctagtcctgggcaacttcacatccgtcctcctgtctcagggctggcagggggagcctggaattaccccctagtgatggaatgacagggtctggtggggactgaattccctggccctggggtcatagcttgggctgttccttctctgatacgggaagagaccccaatcagatttttcaaattaaagccagtcctgggaaatctcaaatccgtgtgctgctttgtctctgggcaaatgtgaaggcgagataaaaacatcaaacattttattgggcgtaggctgtgtacgaggcacagtttctaagcacgtcactgtgttaactcatttaatcctataacagccctacaagatcggtagtattatcatccctattttacaggtgagaaaaccaaggttccaagattatcacttgaggtgggttttaaattatgaacttttttttttttttttttgagatagggtctcgctctgtcacccaggttgaagtacagtggtctgatcatggctcactacagcctcaaactcctgggctcaagcgatcctcctaccaggccactttttttttttctttcttttttttttaagacagattcttactctgtcgcccaggctggagtgcagtggcgtgacttcggctcactgcaacctccacctcccaggttcaaacgattctcctgcctcggcctcccaattagctgggaccgactaattttttatattttttgtagagacagggtttcaccgtgttagccaggatggtcttcatcttctgacctcgtgatctgcctgcctcagcctcccaaagtgctgggattacaggcgtgagccactgtgcctggcctttttttttttttcttaaattttatttcttttctttgctagcaggaagtcaaggcaactttttaaaaatgaaagcaagtcctcgcctggagtctacctgtatttattgaggagcgaaggggagattgctttcagaatggtcccgaaataaaaacacaaaacctggaccctggacagatcctctccaaggagccctgagagtcggctctccaggaaaatgggggaggaaagggggacaacagcccatttttaaaaataaaattcactcctggtctt

SEQ ID NO: 1600 - protein, 236 aa, Homo sapiens [sequence omitted]

SEQ ID NO: 1601 - DNA, 2605 bp, Homo sapiens
gagaaaggcaggagccgctgggtttaggaggtccccgggttgccggcggcgacagcgggggaagcatgactgctgtgggccgaaggtgccccgcgctggggtcccgaggggctgctggagagccagaggctggcagcgactatgtgaagttctccaaggagaagtacatcctggactcatcgccagagaaactccacaaggaattggaggaggagctcaaactcagcagcacggatctccgcagccatgcctggtaccatggccgcatcccccgagaggtctcggagaccttggtacaacgcaacggcgacttcctcatccgggactcactcaccagcctgggcgactatgtgctcacgtgccgctggcgcaaccaggccttgcacttcaagatcaacaaggtggtggtgaaggcaggcgagagctacacacacatccagtacctgtttgagcaggagagctttgaccacgtgcccgccctcgtgcgctatcatgtgggcagccgcaaggctgtgtcagagcagagtggtgccatcatctactgcccggtgaaccgcaccttcccactgcgctacctcgaggccagctatggcctgggacaggggagtagcaagcctgctagccccgtcagcccctcaggccccaagggcagccacatgaagcggcgcagcgtcaccatgaccgatgggctcactgctgacaaggtcacccgcagcgatggctgccccaccagtacgtcgctgccccgccctcgggactccatccgcagctgtgccctcagcatggaccagatcccagacctgcactcacccatgtcgcccatctccgagagccctagctcccctgcctacagcactgtaacccgtgtccatgccgcccctgcagccccttctgccacagcattgcctgcctcccctgtcgcccgccgttccagtgagccccagctgtgtcccggaagtgccccaaagacccatggggagtcagacaagggcccccacaccagcccctcccacacccttggcaaggcctccccgtcaccatcactcagcagctacagtgacccggactctggccactactgccagctccagcctcccgtgcgtggcagccgagagtgggcagcgactgagacctccagccagcaggccaggagctatggggagaggctaaaggaactgtcagaaaatggggcccctgaaggggactggggcaagaccttcacagtccccatcgtggaagtcacttcttccttcaacccggccaccttccagtcactactgatccccagggataaccggccactggaggtgggccttctgcgcaaggtcaaggagctgctggcagaagtggatgcccggacgctggcccggcatgtcaccaaggtggactgcctggttgctaggatactgggcgttaccaaggagatgcagaccctaatgggagtccgctggggcatggaactgctcaccctcccccatggccggcagctacgcctagacctgctggaaaggttccacaccatgtccatcatgctggccgtggacatcctgggctgcaccggctctgcggaggagcgggcagcgctgctgcacaagaccattcagctggcggccgagctgcgggggactatgggcaacatgttcagcttcgcggcggtcatgggtgccctggacatggcccagatttctcggctggagcagacatgggtgaccctgcggcagcgacacacagagggtgccatcctgtacgagaagaagctcaagccttttctcaagagcctcaacgagggcaaagaaggcccgccgctgagcaacaccacgtttcctcatgtgctgcccctcatcaccctgctggagtgtgactcggccccaccagagggccctgagccctggggcagcacggagcacggcgtggaggtggtgctggctcacctggaggccgcccgcacagtggcacaccacggaggcctgtaccacaccaatgctgaagtcaagctgcaggggttccaggcccggccggagctcctggaggtgttcagcacggagttccagatgcgccttctctggggcagtcagggtgccagcagcagccaggcccggcgctatgagaagttcgacaaggtcctcactgccctgtcccacaagctggaacctgctgtccgctccagcgagctgtgaccccagggacatttcccctctgcagctgcggacagcgtcaggggcagaggggcacacaactttccccagagcaccccaaggacactgtgatcaacccgagaatgttctgggttcaactcaagcatctcccttgcacctccagggtcctgcgtggactctgggttccatcccacctgctacatgctcaccaggtctccattgaggaagaacaggaacgccggttcccccaccagcttttgctgctccccttcctgctggggttccctgttttcgagccatgggaggcaggctgctcacgcctcctcactctctgtctgtccctcaccaacaccaaggcctccatctcactgtaaataagtctctgttctgtaaatagatgtacagaagccatgttatttctttcatataataaacttttatgactcttt

SEQ ID NO: 1602 - protein, 703 aa, Homo sapiens
MTAVGRRCPALGSRGAAGEPEAGSDYVKFSKEKYILDSSPEKLHKELEEELKLSSTDLRSHAWYHGRIPREVSETLVQRNGDFLIRDSLTSLGDYVLTCRWRNQALHFKINKVVVKAGESYTHIQYLFEQESFDHVPALVRYHVGSRKAVSEQSGAIIYCPVNRTFPLRYLEASYGLGQGSSKPASPVSPSGPKGSHMKRRSVTMTDGLTADKVTRSDGCPTSTSLPRPRDSIRSCALSMDQIPDLHSPMSPISESPSSPAYSTVTRVHAAPAAPSATALPASPVARRSSEPQLCPGSAPKTHGESDKGPHTSPSHTLGKASPSPSLSSYSDPDSGHYCQLQPPVRGSREWAATETSSQQARSYGERLKELSENGAPEGDWGKTFTVPIVEVTSSFNPATFQSLLIPRDNRPLEVGLLRKVKELLAEVDARTLARHVTKVDCLVARILGVTKEMQTLMGVRWGMELLTLPHGRQLRLDLLERFHTMSIMLAVDILGCTGSAEERAALLHKTIQLAAELRGTMGNMFSFAAVMGALDMAQISRLEQTWVTLRQRHTEGAILYEKKLKPFLKSLNEGKEGPPLSNTTFPHVLPLITLLECDSAPPEGPEPWGSTEHGVEVVLAHLEAARTVAHHGGLYHTNAEVKLQGFQARPELLEVFSTEFQMRLLWGSQGASSSQARRYEKFDKVLTALSHKLEPAVRSSEL

SEQ ID NO: 1603 - DNA, 3153 bp, Homo sapiens
gagtttcactggtttaaaaatacacagaggaagcgagtaagagaaaggggaaggggaggtgggagaggcacctcaactttgatgtcccgagccttgagtggccactcgcaagctggccaagggcttcacacaatttgccaagatgacagaggggaccaagaagaccagcaaaaagttcaagttcttcaagttcaagggctttgggagtctctccaacctccctcggtccttcactctgagacgatcctcagcttccatcagtaggcagtcccatttggagcctgacacctttgaagccacgcaggatgacatggtgacggtgcccaagagtcccccagcctatgcccgctccagtgacatgtacagccacatgggcaccatgcctcgccccagcatcaagaaagcacagaactcacaggctgcccggcaggcccaggaggcgggtcccaagcccaacttggtacccggaggtgtacccgaccccccaggcttggaggcagccaaagaggtgatggtgaaggccactggccctctagaggacaccccagcaatggaacccaacccttcagcagtggaggtagaccccatcagaaagcctgaggtccccacaggagacgtagaagaggagagacctcccagggacgtgcactcagaaagggctgctggagagccagaggctggcagcgactatgtgaagttctccaaggagaagtacatcctggactcatcgccagagaaactccacaaggaattggaggaggagctcaaactcagcagcacggatctccgcagccatgcctggtaccatggccgcatcccccgagaggtctcggagaccttggtacaacgcaacggcgacttcctcatccgggactcactcaccagcctgggcgactatgtgctcacgtgccgctggcgcaaccaggccttgcacttcaagatcaacaaggtggtggtgaaggcaggcgagagctacacacacatccagtacctgtttgagcaggagagctttgaccacgtgcccgccctcgtgcgctatcatgtgggcagccgcaaggctgtgtcagagcagagtggtgccatcatctactgcccggtgaaccgcaccttcccactgcgctacctcgaggccagctatggcctgggacaggggagtagcaagcctgctagccccgtcagcccctcaggccccaagggcagccacatgaagcggcgcagcgtcaccatgaccgatgggctcactgctgacaaggtcacccgcagcgatggctgccccaccagtacgtcgctgccccgccctcgggactccatccgcagctgtgccctcagcatggaccagatcccagacctgcactcacccatgtcgcccatctccgagagccctagctcccctgcctacagcactgtaacccgtgtccatgccgcccctgcagccccttctgccacagcattgcctgcctcccctgtcgcccgccgttccagtgagccccagctgtgtcccggaagtgccccaaagacccatggggagtcagacaagggcccccacaccagcccctcccacacccttggcaaggcctccccgtcaccatcactcagcagctacagtgacccggactctggccactactgccagctccagcctcccgtgcgtggcagccgagagtgggcagcgactgagacctccagccagcaggccaggagctatggggagaggctaaaggaactgtcagaaaatggggcccctgaaggggactggggcaagaccttcacagtccccatcgtggaagtcacttcttccttcaacccggccaccttccagtcactactgatccccagggataaccggccactggaggtgggccttctgcgcaaggtcaaggagctgctggcagaagtggatgcccggacgctggcccggcatgtcaccaaggtggactgcctggttgctaggatactgggcgttaccaaggagatgcagaccctaatgggagtccgctggggcatggaactgctcaccctcccccatggccggcagctacgcctagacctgctggaaaggttccacaccatgtccatcatgctggccgtggacatcctgggctgcaccggctctgcggaggagcgggcagcgctgctgcacaagaccattcagctggcggccgagctgcgggggactatgggcaacatgttcagcttcgcggcggtcatgggtgccctggacatggcccagatttctcggctggagcagacatgggtgaccctgcggcagcgacacacagagggtgccatcctgtacgagaagaagctcaagccttttctcaagagcctcaacgagggcaaagaaggcccgccgctgagcaacaccacgtttcctcatgtgctgcccctcatcaccctgctggagtgtgactcggccccaccagagggccctgagccctggggcagcacggagcacggcgtggaggtggtgctggctcacctggaggccgcccgcacagtggcacaccacggaggcctgtaccacaccaatgctgaagtcaagctgcaggggttccaggcccggccggagctcctggaggtgttcagcacggagttccagatgcgccttctctggggcagtcagggtgccagcagcagccaggcccggcgctatgagaagttcgacaaggtcctcactgccctgtcccacaagctggaacctgctgtccgctccagcgagctgtgaccccagggacatttcccctctgcagctgcggacagcgtcaggggcagaggggcacacaactttccccagagcaccccaaggacactgtgatcaacccgagaatgttctgggttcaactcaagcatctcccttgcacctccagggtcctgcgtggactctgggttccatcccacctgctacatgctcaccaggtctccattgaggaagaacaggaacgccggttcccccaccagcttttgctgctccccttcctgctggggttccctgttttcgagccatgggaggcaggctgctcacgcctcctcactctctgtctgtccctcaccaacaccaaggcctccatctcactgtaaataagtctctgttctgtaaatagatgtacagaagccatgttatttctttcatataataaacttttatgactcttt

SEQ ID NO: 1604 - protein, 860 aa, Homo sapiens
MTEGTKKTSKKFKFFKFKGFGSLSNLPRSFTLRRSSASISRQSHLEPDTFEATQDDMVTVPKSPPAYARSSDMYSHMGTMPRPSIKKAQNSQAARQAQEAGPKPNLVPGGVPDPPGLEAAKEVMVKATGPLEDTPAMEPNPSAVEVDPIRKPEVPTGDVEEERPPRDVHSERAAGEPEAGSDYVKFSKEKYILDSSPEKLHKELEEELKLSSTDLRSHAWYHGRIPREVSETLVQRNGDFLIRDSLTSLGDYVLTCRWRNQALHFKINKVVVKAGESYTHIQYLFEQESFDHVPALVRYHVGSRKAVSEQSGAIIYCPVNRTFPLRYLEASYGLGQGSSKPASPVSPSGPKGSHMKRRSVTMTDGLTADKVTRSDGCPTSTSLPRPRDSIRSCALSMDQIPDLHSPMSPISESPSSPAYSTVTRVHAAPAAPSATALPASPVARRSSEPQLCPGSAPKTHGESDKGPHTSPSHTLGKASPSPSLSSYSDPDSGHYCQLQPPVRGSREWAATETSSQQARSYGERLKELSENGAPEGDWGKTFTVPIVEVTSSFNPATFQSLLIPRDNRPLEVGLLRKVKELLAEVDARTLARHVTKVDCLVARILGVTKEMQTLMGVRWGMELLTLPHGRQLRLDLLERFHTMSIMLAVDILGCTGSAEERAALLHKTIQLAAELRGTMGNMFSFAAVMGALDMAQISRLEQTWVTLRQRHTEGAILYEKKLKPFLKSLNEGKEGPPLSNTTFPHVLPLITLLECDSAPPEGPEPWGSTEHGVEVVLAHLEAARTVAHHGGLYHTNAEVKLQGFQARPELLEVFSTEFQMRLLWGSQGASSSQARRYEKFDKVLTALSHKLEPAVRSSEL

SEQ ID NO: 1605 - DNA, 2280 bp, Homo sapiens
atggcttgctcgaggccccccagccagtgtgaacccacatccctgcccccagggccacctgcaggacgccgacacctacccctcagcagacgccggagagaaatgagtagcaacaaagagcagcggtcagcagtgttcgtgatcctctttgccctcatcaccatcctcatcctctacagctccaacagtgccaatgaggtcttccattacggctccctgcggggccgtagccgccgacctgtcaacctcaagaagtggagcatcactgacggctatgtccccattctcggcaacaagacactgccctctcggtgccaccagtgtgtgattgtcagcagctccagccacctgctgggcaccaagctgggccctgagatcgagcgggctgagtgtacaatccgcatgaatgatgcacccaccactggctactcagctgatgtgggcaacaagaccacctaccgcgtcgtggcccattccagtgtgttccgcgtgctgaggaggccccaggagtttgtcaaccggacccctgaaaccgtgttcatcttctgggggcccccgagcaagatgcagaagccccagggcagcctcgtgcgtgtgatccagcgagcgggcctggtgttccccaacatggaagcatatgccgtctctcccggccgcatgcggcaatttgacgacctcttccggggtgagacgggcaaggacagggagaagtctcattcgtggttgagcacaggctggtttaccatggtgatcgcggtggagttgtgtgaccacgtgcatgtctatggcatggtcccccccaactactgcagccagcggccccgcctccagcgcatgccctaccactactacgagcccaaggggccggacgaatgtgtcacctacatccagaatgagcacagtcgcaagggcaaccaccaccgcttcatcaccgagaaaagggtcttctcatcgtgggcccagctgtatggcatcaccttctcccacccctcctggacctaggccacccagcctgtgggacctcaggagggtcagaggagaagcagcctccgcccagccgctaggccagggaccatcttctggccaatcaaggcttgctggagtgtctcccagccaatcagggccttgaggaggatgtatcctccagccaatcagggcctggggaatctgttggcgaatcagggatttgggagtctatgcggttaatcaggggtgtctttcttgtgcagtcagggtctgcgcacagtcaatcagggtagagggggtatttctgagtcaatctgaggctaaggacatgtcctttcccatgaggccttggttcagagccccaggaatggaccccccaatcactccccactctcctgggataatggggtcctgtcccaaggagctgggaacttggtgttgccccctcaatttccagcaccagaaagagagattgtgtgggggtagaagctgtctggaggcccggccagagaatttgtggggttgtggaggttgtgggggcggtggggaggtcccagaggtgggaggccggcatccaggtcttggctctgccctgagaccttggacaaacccttccccctctctgggcacccttctgcccacaccagtttccagtgcggagtctgagaccctttccacctcccctacaagtgccctcgggtctgtcctccccgtctggaccctcccagccactatcccttgctggaaggctcagctctttggggggtctggggtgacctccccacctcctggaaaactttagggtatttttgcgcaaactccttcagggttgggggactctgaaggaaacgggacaaaaccttaagctgttttcttagcccctcagccagctgccattagcttggctcttaaagggccaggcctccttttctgccctctagcagggaggttttccaactgttggaggcgcctttggggctgcccctttgtctggagtcactgggggcttccgagggtctccctcgaccctctgtcgtcctgggatggctgtcgggagctgtatcacctgggttctgtcccctggctctgtatcaggcactttattaaagctgggcctcagtggggtgtgtttgtctcctgctcttctggagcctggaaggaaagggcttcaggaggaggctgtgaggctggagggaccagatggaggaggccagcagctagccattgcacactggggtgatgggtgggggcggtgactgccccagacttggttttgtaatgatttgtacaggaataaacacacctacgctccgg

SEQ ID NO: 1606 - protein, 333 aa, Homo sapiens
MACSRPPSQCEPTSLPPGPPAGRRHLPLSRRRREMSSNKEQRSAVFVILFALITILILYSSNSANEVFHYGSLRGRSRRPVNLKKWSITDGYVPILGNKTLPSRCHQCVIVSSSSHLLGTKLGPEIERAECTIRMNDAPTTGYSADVGNKTTYRVVAHSSVFRVLRRPQEFVNRTPETVFIFWGPPSKMQKPQGSLVRVIQRAGLVFPNMEAYAVSPGRMRQFDDLFRGETGKDREKSHSWLSTGWFTMVIAVELCDHVHVYGMVPPNYCSQRPRLQRMPYHYYEPKGPDECVTYIQNEHSRKGNHHRFITEKRVFSSWAQLYGITFSHPSWT

SEQ ID NO: 1607 - DNA, 5680 bp, Homo sapiens
gtagaaaattatgaccacaaagcaatggtcccttttgggttccctgaatttttccgctgtgaccctgcaatctctccgagccttcatgcagcagcacagatttctaggggagaatttgtccgcatctcaggattagattatgtggacagtgccctcctgatggggagagacagggacaagcctttcaaacggaggttgaaatcagagtcggtggaaacatctctcttccgaaagcttcgaactgttaaaagtgagcacgaaactttcaagttcacgtctgagctggaggagagccgactggagaggggcattcgcccttggaattgtcagcgatgttttgcacattatgatgtccagagcattttgtttaatatcaacgaagccatggctacgagggctaatgtggggaaaaggaaaaacataaccactggggcatctgcagcatcccagactcagatgcctacgggccagacaggcaactgtgagtcccctttagggagcaaggaggacctcaactccaaagagaacctggatgccgatgagggtgatgggaaaagtaacgacctcgtccttagttgtccttactttagaaatgagactggaggggaaggcgacaggcggattgcgctctctcgagccaactcatcctctttcagttctggggaaagctgctctttcgaatcgtcactcagctctcactgcacaaatgcaggtgtctccgtcttggaagtgcccagagaaaaccagcctattcacagggagaaagtgaagcgctacatcatagaacacattgaccttggggcctattattaccgcaaattcttctatgggaaagagcaccaaaactactttggaatagatgaaaaccttggtccagtagcagtcagcatccggagagagaaggtggaagatgccaaggagaaagaaggatcccagttcaactacagggtggctttcaggacaagtgagcttacaacactgagaggagcaattttagaagatgctataccctctactgctaggcatggtaccgcacgaggactacctctcaaagaagttttggaatacgtcattccagagctgagcattcagtgtttgcgacaggcttccaactcacccaaggtctcagagcagctgctcaagcttgatgaacaagggctgagctttcagcacaagatcgggatcctttattgcaaagcaggccagagcacagaggaagagatgtataacaatgagacggcgggaccagcttttgaagaattccttgatcttctgggccagagagtccgactgaaaggatttagtaaatatcgagctcagctagacaataagactgattccacgggcacgcactctctctataccacatacaaagactacgaactcatgttccacgtgtcaaccctgcttccctacatgcccaacaacagacaacagctactgaggaaaaggcacataggaaatgacatcgtcaccatcgtcttccaggagcctggggcacttccttttactccaaaaagcatccggtctcactttcagcatgtctttgtcatagtcaaagtgcataatccatgtaccgaaaatgtgtgttatagtgttggagtttccagatcaaaagatgtgccaccatttggcccaccgattcccaaaggtgtaacttttccaaagtcagccgtgttccgggacttccttttagccaaagtaatcaatgcagaaaatgcagcccataaatcagaaaagtttcgagcaatggccactcgaacgaggcaggagtacttgaaagatctggcggagaactttgtcacaaccgccaccgtggatacctctgtgaagttcagcttcattacgctgggtgcgaagaaaaaggagaaggtaaagccaaggaaggatgcccacttgtttagcattggggccatcatgtggcacgtgatagcccgggacttcggccagtctgctgacattgaatgtcttctcgggatctccaatgagttcatcatgttgattgaaaaggattccaagaatgttgtattcaactgttcctgcagggatgtgattgggtggacatctggattagtgagtatcaaagtgttttacgaaagaggagaatgtgtcctcctgtcctcggtagacaactgtgctgaagacatcagggaaattgttcagcgattagtaatagtgacgagaggctgcgagactgtggaaatgaccctgaggaggaacgggctgggccagcttggcttccatgtgaattttgaaggaattgtcgcagatgtggaaccttttggctttgcctggaaggctggccttcgccaagggagccgcctcgtggagatctgcaaagtagccgtggccactctgacccacgagcagatgatcgacctgctccgtacttctgtgactgtgaaggtggtcatcatccagccccatgatgacggctcgccccgaagagggtgttcagagctctgccggatccctatggtggaatataaactcgacagcgagggcaccccctgcgagtataaaacccccttcaggaggaacaccacgtggcaccgggtgcccactcctgccctgcagcccctctctagagcttcccccatccccggcacgcccgaccggctgccgtgccaacagctgctccagcaggcccaggctgccattcctcgaagcacctccttcgaccggaagctgcccgatggcacgagaagctcacccagcaaccagtcatcctccagcgaccctggacccggcgggagcggaccctggagaccacaagtgggctacgacgggtgccagtcccctctactgctcgaacaccagggctcaggccctttggaatgtgacggagccagggagagggaagacaccatggaagcaagcaggcacccggaaaccaaatggcatggcccaccttccaaagtcctgggttcctataaagaaagagctctgcagaaagatggaagttgcaaagattcccccaataagctttctcacattggggataaaagttgctccagtcactccagcagcaacacgctctccagcaacacctccagcaacagtgacgacaagcactttgggtctggcgacctgatggaccccgaattactggggctgacctacatcaaaggggcctccaccgacagtggcatcgacacggccccctgcatgcctgccaccatcctcggccctgtgcacctggcaggcagcaggtccctgatccacagccgggccgagcagtgggctgatgctgccgacgtctctgggcctgacgacgagccagccaagttatattctgtgcatggctacgcgtccaccatctccgccggcagtgctgcggaaggcagcatgggcgatctcagtgagatatcctctcattccagtggttctcaccattcaggaagcccttcagctcactgttcaaaaagtagtgggtctctggattcatccaaagtctacatcgtgtctcacagcagcggacaacaggttcccgggtccatgtccaagccctaccacagacaaggggcagtgaacaaatatgtcatcggctggaagaaatcggagggcagcccaccgcccgaggagcctgaagtgactgaatgtcccgggatgtatagtgagatggatgtcatgtccacagcaactcagcatcagacagtggtgggagatgctgttgcagagactcaacatgttctgtctaaagaagattttctgaaattgatgcttcctgacagccccttagtggaggaggggcgaagaaagttttcgttctatgggaacctgtctccaaggaggtcgctttaccgcacgctgtctgacgagagcatctgcagcaacaggagggggtcctcctttggcagttcccggagttccgtgcttgaccaggccctgcccaacgacattctgttcagcaccaccccaccctaccacagcacgctgcctccgcgggcccaccccgcacccagcatggggagcctgagaaatgagttctggttctccgatgggtccttatcagataagtccaagtgcgcagatcctggcctgatgcccctcccggacacagccacagggttagattggacccacctcgtggatgctgcacgggcatttgaaggtcttgactcagatgaagaactggggctgctctgtcaccacacgtcctatctagaccagagggtggcatccttctgcaccctgacagatatgcagcatgggcaggacctggaaggggcccaagagctgcccttatgtgtagatccaggcagtggcaaagagttcatggacacaactggggagcgttctccatcaccactgaccgggaaagtcaatcagctggaattaattcttcgacaactccagaccgaccttcggaaggaaaaacaagacaaggccgttctccaagcagaagtgcagcacctgagacaggacaacatgagactgcaggaggagtcccagaccgcgacagctcagctgcggaaattcacagaatggtttttcaccaccatcgacaaaaaatcttagccaatccgcacctcatcaagggaccactgggaaatgccccttgtccctttgaagtcacaaacatgtggtttttctgtgtgctttcaaccaatcgtagatgtttttgctgttccattctgtgtagcaccattcaccacagcaggatagggagcctcgactctttctcggtaaccacggcagagagcagcgccgatgtgaagatgaatgaatgtaactcctggtgtgaagatgaatgtaaaccctggcgacagttgagacctttttcttttagactctgctaaaacagtgctctggcttgggcttacctcaagagggaagatagttgagttttatttcctgtatatcaggtgacctggtagagatgtaaagcaatttaccatagtttgggctttagtattgtaaaataaacatgagaacaaataatcagacatatactttaatgttaaaggtgctctatttttttggatgtacagtagttttatttccacagccacattaccatagcaataagaaaggaggcatagtacatagttggaaaagctttgtggggggattaaaaaaaaaaaaaagcactgttgtgtttaacactagttcagatgcagttaccttagagacttatttatttgcaggaacaaatggtgcctgaatattaacagtgttctgattaaaaacaaaaaaaagatacatatgccttgtaaatggctcaccgagtggtcagtagtcacttcaactcttagttcacttttgtatagttgctctgctggaaagaaatgagagtgaatctgcttactcactagaacttccctgtgtgctgtgagccagcggaaccacttgtacaatgccagatttgtttatctttgtacagaagctttgatgaagtgtcttgtatttaacacccttatttaagcttatttaaccttaaattgttaattttataaaatttggtttggcctgcactacgatgagggatggaggtagctgcaggctcagaagagactgagcttgcacagatcagaccgagaagcagggtgagagattctaacgactggatgctgctagtaacacattgtttgtattgctttaccatttttaactgttagatttgagatgaacatacattttgcttttttaataaatgtttaaaagaagtccacataag

SEQ ID NO: 1608 - protein, 1506 aa, Homo sapiens
VENYDHKAMVPFGFPEFFRCDPAISPSLHAAAQISRGEFVRISGLDYVDSALLMGRDRDKPFKRRLKSESVETSLFRKLRTVKSEHETFKFTSELEESRLERGIRPWNCQRCFAHYDVQSILFNINEAMATRANVGKRKNITTGASAASQTQMPTGQTGNCESPLGSKEDLNSKENLDADEGDGKSNDLVLSCPYFRNETGGEGDRRIALSRANSSSFSSGESCSFESSLSSHCTNAGVSVLEVPRENQPIHREKVKRYIIEHIDLGAYYYRKFFYGKEHQNYFGIDENLGPVAVSIRREKVEDAKEKEGSQFNYRVAFRTSELTTLRGAILEDAIPSTARHGTARGLPLKEVLEYVIPELSIQCLRQASNSPKVSEQLLKLDEQGLSFQHKIGILYCKAGQSTEEEMYNNETAGPAFEEFLDLLGQRVRLKGFSKYRAQLDNKTDSTGTHSLYTTYKDYELMFHVSTLLPYMPNNRQQLLRKRHIGNDIVTIVFQEPGALPFTPKSIRSHFQHVFVIVKVHNPCTENVCYSVGVSRSKDVPPFGPPIPKGVTFPKSAVFRDFLLAKVINAENAAHKSEKFRAMATRTRQEYLKDLAENFVTTATVDTSVKFSFITLGAKKKEKVKPRKDAHLFSIGAIMWHVIARDFGQSADIECLLGISNEFIMLIEKDSKNVVFNCSCRDVIGWTSGLVSIKVFYERGECVLLSSVDNCAEDIREIVQRLVIVTRGCETVEMTLRRNGLGQLGFHVNFEGIVADVEPFGFAWKAGLRQGSRLVEICKVAVATLTHEQMIDLLRTSVTVKVVIIQPHDDGSPRRGCSELCRIPMVEYKLDSEGTPCEYKTPFRRNTTWHRVPTPALQPLSRASPIPGTPDRLPCQQLLQQAQAAIPRSTSFDRKLPDGTRSSPSNQSSSSDPGPGGSGPWRPQVGYDGCQSPLLLEHQGSGPLECDGAREREDTMEASRHPETKWHGPPSKVLGSYKERALQKDGSCKDSPNKLSHIGDKSCSSHSSSNTLSSNTSSNSDDKHFGSGDLMDPELLGLTYIKGASTDSGIDTAPCMPATILGPVHLAGSRSLIHSRAEQWADAADVSGPDDEPAKLYSVHGYASTISAGSAAEGSMGDLSEISSHSSGSHHSGSPSAHCSKSSGSLDSSKVYIVSHSSGQQVPGSMSKPYHRQGAVNKYVIGWKKSEGSPPPEEPEVTECPGMYSEMDVMSTATQHQTVVGDAVAETQHVLSKEDFLKLMLPDSPLVEEGRRKFSFYGNLSPRRSLYRTLSDESICSNRRGSSFGSSRSSVLDQALPNDILFSTTPPYHSTLPPRAHPAPSMGSLRNEFWFSDGSLSDKSKCADPGLMPLPDTATGLDWTHLVDAARAFEGLDSDEELGLLCHHTSYLDQRVASFCTLTDMQHGQDLEGAQELPLCVDPGSGKEFMDTTGERSPSPLTGKVNQLELILRQLQTDLRKEKQDKAVLQAEVQHLRQDNMRLQEESQTATAQLRKFTEWFFTTIDKKS

SEQ ID NO: 1609 - DNA, 2937 bp, Homo sapiens
acttactgtcataggtcttattaaataggtatctatgtagtcagagcatgtttcatagaaatggagtgttcattaaactgaaacttcatacattgcctctgggcttttggggataggagtatgatacctcccaacttgaaattcccacagataggtgaggtcatagtcatcgggtgatacttaatgagcccatgtttttctttcattggatgtaaactatgctcgatagtgacgagaggctgcgagactgtggaaatgaccctgaggaggaacgggctgggccagcttggcttccatgtgaattttgaaggaattgtcgcagatgtggaaccttttggctttgcctggaaggctggccttcgccaagggagccgcctcgtggagatctgcaaagtagccgtggccactctgacccacgagcagatgatcgacctgctccgtacttctgtgactgtgaaggtggtcatcatccagccccatgatgacggctcgccccgaagagggtgttcagagctctgccggatccctatggtggaatataaactcgacagcgagggcaccccctgcgagtataaaacccccttcaggaggaacaccacgtggcaccgggtgcccactcctgccctgcagcccctctctagagcttcccccatccccggcacgcccgaccggctgccgtgccaacagctgctccagcaggcccaggctgccattcctcgaagcacctccttcgaccggaagctgcccgatggcacgagaagctcacccagcaaccagtcatcctccagcgaccctggacccggcgggagcggaccctggagaccacaagtgggctacgacgggtgccagtcccctctactgctcgaacaccagggctcaggccctttggaatgtgacggagccagggagagggaagacaccatggaagcaagcaggcacccggaaaccaaatggcatggcccaccttccaaagtcctgggttcctataaagaaagagctctgcagaaagatggaagttgcaaagattcccccaataagctttctcacattggggataaaagttgctccagtcactccagcagcaacacgctctccagcaacacctccagcaacagtgacgacaagcactttgggtctggcgacctgatggaccccgaattactggggctgacctacatcaaaggggcctccaccgacagtggcatcgacacggccccctgcatgcctgccaccatcctcggccctgtgcacctggcaggcagcaggtccctgatccacagccgggccgagcagtgggctgatgctgccgacgtctctgggcctgacgacgagccagccaagttatattctgtgcatggctacgcgtccaccatctccgccggcagtgctgcggaaggcagcatgggcgatctcagtgagatatcctctcattccagtggttctcaccattcaggaagcccttcagctcactgttcaaaaagtagtgggtctctggattcatccaaagtctacatcgtgtctcacagcagcggacaacaggttcccgggtccatgtccaagccctaccacagacaaggggcagtgaacaaatatgtcatcggctggaagaaatcggagggcagcccaccgcccgaggagcctgaagtgactgaatgtcccgggatgtatagtgagatggatgtcatgtccacagcaactcagcatcagacagtggtgggagatgctgttgcagagactcaacatgttctgtctaaagaagattttctgaaattgatgcttcctgacagccccttagtggaggaggggcgaagaaagttttcgttctatgggaacctgtctccaaggaggtcgctttaccgcacgctgtctgacgagagcatctgcagcaacaggagggggtcctcctttggcagttcccggagttccgtgcttgaccaggccctgcccaacgacattctgttcagcaccaccccaccctaccacagcacgctgcctccgcgggcccaccccgcacccagcatggggagcctgagaaatgagttctggttctccgatgggtccttatcagataagtccaagtgcgcagatcctggcctgatgcccctcccggacacagccacagggttagattggacccacctcgtggatgctgcacgggcatttgaagaccagagggtggcatccttctgcaccctgacagatatgcagcatgggcaggacctggaaggggcccaagagctgcccttatgtgtagatccaggcagtggcaaagagttcatggacacaactggggagcgttctccatcaccactgaccgggaaagtcaatcagctggaattaattcttcgacaactccagaccgaccttcggaaggaaaaacaagacaaggccgttctccaagcagaagtgcagcacctgagacaggacaacatgagactgcaggaggagtcccagaccgcgacagctcagctgcggaaattcacagaatggtttttcaccaccatcgacaaaaaatcttagccaatccgcacctcatcaagggaccactgggaaatgccccttgtccctttgaagtcacaaacatgtggtttttctgtgtgctttcaaccaatcgtagatgtttttgctgttccattctgtgtagcaccattcaccacagcaggatagggagcctcgactctttctcggtaaccacggcagagagcagcgccgatgtgaagatgaatgaatgtaactcctggtgtgaagatgaatgtaaaccctggcgacagttgagacctttttcttttagactctgctaaaacagtgctctggcttgggcttacctcaagagggaagatagttgagttttatttcctgtatatcaggtgacctggtagagatgtaaagcaatttaccatagtttgggctttagtattgtaaaataaacatgagaac

SEQ ID NO: 1610 - protein, 778 aa, Homo sapiens
MSPCFSFIGCKLCSIVTRGCETVEMTLRRNGLGQLGFHVNFEGIVADVEPFGFAWKAGLRQGSRLVEICKVAVATLTHEQMIDLLRTSVTVKVVIIQPHDDGSPRRGCSELCRIPMVEYKLDSEGTPCEYKTPFRRNTTWHRVPTPALQPLSRASPIPGTPDRLPCQQLLQQAQAAIPRSTSFDRKLPDGTRSSPSNQSSSSDPGPGGSGPWRPQVGYDGCQSPLLLEHQGSGPLECDGAREREDTMEASRHPETKWHGPPSKVLGSYKERALQKDGSCKDSPNKLSHIGDKSCSSHSSSNTLSSNTSSNSDDKHFGSGDLMDPELLGLTYIKGASTDSGIDTAPCMPATILGPVHLAGSRSLIHSRAEQWADAADVSGPDDEPAKLYSVHGYASTISAGSAAEGSMGDLSEISSHSSGSHHSGSPSAHCSKSSGSLDSSKVYIVSHSSGQQVPGSMSKPYHRQGAVNKYVIGWKKSEGSPPPEEPEVTECPGMYSEMDVMSTATQHQTVVGDAVAETQHVLSKEDFLKLMLPDSPLVEEGRRKFSFYGNLSPRRSLYRTLSDESICSNRRGSSFGSSRSSVLDQALPNDILFSTTPPYHSTLPPRAHPAPSMGSLRNEFWFSDGSLSDKSKCADPGLMPLPDTATGLDWTHLVDAARAFEDQRVASFCTLTDMQHGQDLEGAQELPLCVDPGSGKEFMDTTGERSPSPLTGKVNQLELILRQLQTDLRKEKQDKAVLQAEVQHLRQDNMRLQEESQTATAQLRKFTEWFFTTIDKKS

SEQ ID NO: 1611 - DNA, 1702 bp, Homo sapiens
agggtacgggccgggaccgccgcagcccggggcgggggcacggcaaccgcgaggcctgggggcgcccgccccccgcgccccacgcccggtgccagcgagccgaggcgtgcatctccttatatggtcaaatgacacggcggggtttctcgagggcgggagctgcgcagcgctccactcggccggcagcggagccgcagccaccagccgcccgcgccctccagccccgtccgggagtccccggcccgctgcggtgccgtgagtacctccaaccccctgcgccccggagggaggccgaggggcttagccaccagggctcggaagtgggggccgaatccggtgcgagacccaaggagaggggagcagagccggagttggggagactggttgctgaaaagccaggagtcaaaatgactgagcgctttgactgccaccattgcaacgaatctctctttggcaagaagtacatcctgcgggaggagagcccctactgcgtggtgtgctttgagaccctgttcgccaacacctgcgaggagtgtgggaagcccatcggctgtgactgcaaggacttgtcttacaaggaccggcactggcatgaagcctgtttccactgctcgcagtgcagaaactcactggtggacaagccctttgctgccaaggaggaccagctgctctgtacagactgctattccaacgagtactcatccaagtgccaggaatgcaagaagaccatcatgccaggtacccgcaagatggagtacaagggcagcagctggcatgagacctgcttcatctgccaccgctgccagcagccaattggaaccaagagtttcatccccaaagacaatcagaatttctgtgtgccctgctatgagaaacaacatgccatgcagtgcgttcagtgcaaaaagcccatcaccacgggaggggtcacttaccgggagcagccctggcacaaggagtgcttcgtgtgcaccgcctgcaggaagcagctgtctgggcagcgcttcacagctcgcgatgactttgcctactgcctgaactgcttctgtgacttgtatgccaagaagtgtgctgggtgcaccaaccccatcagcggacttggtggcacaaaatacatctcctttgaggaacggcagtggcataacgactgctttaactgtaagaagtgctccctctcactggtggggcgtggcttcctcacagagagggacgacatcctgtgccccgactgtgggaaagacatctgaattcaacacagagaagttgctgcttgtgatctcacacacagatttttatgttttctttctcacccaggcaatcttgccttctggtttcttccagccacattgagactttcttctagtgcttttcagtgatactcacgtttgcttaaaccctttagtgctttgtgatagttcagtcccagggaaagagaaaactcgccctaggccctaggtgggaagatggtttgaaatttttgtaatcgagtaaggcacacccaaatgtaaaaatccttttgaatgatgcctttataaatctttctctcactgtctatttaagtgcaattaacatatgtcacgaacttgaaagttttctaaactcaataaggtaatgaccagttgttatttacagctctgtaacctcccgttgcgtcaagtctaaaccaagattatgtgacttgcaataaagttattcagaacag

SEQ ID NO: 1612 - protein, 372 aa, Homo sapiens [sequence omitted]

SEQ ID NO: 1613 - DNA, 1433 bp, Homo sapiens
cgcagccaccagccgcccgcgccctccagccccgtccgggagtccccggcccgctgcggtgcctggctgagaactgtgtcttcctggagactaggctggcattttgactttggggttgctgaaaagccaggagtcaaaatgactgagcgctttgactgccaccattgcaacgaatctctctttggcaagaagtacatcctgcgggaggagagcccctactgcgtggtgtgctttgagaccctgttcgccaacacctgcgaggagtgtgggaagcccatcggctgtgactgcaaggacttgtcttacaaggaccggcactggcatgaagcctgtttccactgctcgcagtgcagaaactcactggtggacaagccctttgctgccaaggaggaccagctgctctgtacagactgctattccaacgagtactcatccaagtgccaggaatgcaagaagaccatcatgccaggtacccgcaagatggagtacaagggcagcagctggcatgagacctgcttcatctgccaccgctgccagcagccaattggaaccaagagtttcatccccaaagacaatcagaatttctgtgtgccctgctatgagaaacaacatgccatgcagtgcgttcagtgcaaaaagcccatcaccacgggaggggtcacttaccgggagcagccctggcacaaggagtgcttcgtgtgcaccgcctgcaggaagcagctgtctgggcagcgcttcacagctcgcgatgactttgcctactgcctgaactgcttctgtgacttgtatgccaagaagtgtgctgggtgcaccaaccccatcagcggacttggtggcacaaaatacatctcctttgaggaacggcagtggcataacgactgctttaactgtaagaagtgctccctctcactggtggggcgtggcttcctcacagagagggacgacatcctgtgccccgactgtgggaaagacatctgaattcaacacagagaagttgctgcttgtgatctcacacacagatttttatgttttctttctcacccaggcaatcttgccttctggtttcttccagccacattgagactttcttctagtgcttttcagtgatactcacgtttgcttaaaccctttagtgctttgtgatagttcagtcccagggaaagagaaaactcgccctaggccctaggtgggaagatggtttgaaatttttgtaatcgagtaaggcacacccaaatgtaaaaatccttttgaatgatgcctttataaatctttctctcactgtctatttaagtgcaattaacatatgtcacgaacttgaaagttttctaaactcaataaggtaatgaccagttgttatttacagctctgtaacctcccgttgcgtcaagtctaaaccaagattatgtgacttgcaataaagttattcagaacag

SEQ ID NO: 1614 - protein, 279 aa, Homo sapiens
MTERFDCHHCNESLFGKKYILREESPYCVVCFETLFANTCEECGKPIGCDCKDLSYKDRHWHEACFHCSQCRNSLVDKPFAAKEDQLLCTDCYSNEYSSKCQECKKTIMPGTRKMEYKGSSWHETCFICHRCQQPIGTKSFIPKDNQNFCVPCYEKQHAMQCVQCKKPITTGGVTYREQPWHKECFVCTACRKQLSGQRFTARDDFAYCLNCFCDLYAKKCAGCTNPISGLGGTKYISFEERQWHNDCFNCKKCSLSLVGRGFLTERDDILCPDCGKDI

SEQ ID NO: 1615 - DNA, 1578 bp, Homo sapiens
agggtacgggccgggaccgccgcagcccggggcgggggcacggcaaccgcgaggcctgggggcgcccgccccccgcgccccacgcccggtgccagcgagccgaggcgtgcatctccttatatggtcaaatgacacggcggggtttctcgagggcgggagctgcgcagcgctccactcggccggcagcggagccgcagccaccagccgcccgcgccctccagccccgtccgggagtccccggcccgctgcggtgccgtgagtacctccaaccccctgcgccccggagggaggccgaggggcttagccaccagggctcggaagtgggggccgaatccggtgcgagacccaaggagaggggagcagagccggagttggggagactgtggctgagaactgtgtcttcctggagactaggctggcattttgactttggggttgctgaaaagccaggagtcaaaatgactgagcgctttgactgccaccattgcaacgaatctctctttggcaagaagtacatcctgcgggaggagagcccctactgcgtggtgtgctttgagaccctgttcgccaacacctgcgaggagtgtgggaagcccatcggctgtgactgcaaggtacccgcaagatggagtacaagggcagcagctggcatgagacctgcttcatctgccaccgctgccagcagccaattggaaccaagagtttcatccccaaagacaatcagaatttctgtgtgccctgctatgagaaacaacatgccatgcagtgcgttcagtgcaaaaagcccatcaccacgggaggggtcacttaccgggagcagccctggcacaaggagtgcttcgtgtgcaccgcctgcaggaagcagctgtctgggcagcgcttcacagctcgcgatgactttgcctactgcctgaactgcttctgtgacttgtatgccaagaagtgtgctgggtgcaccaaccccatcagcggacttggtggcacaaaatacatctcctttgaggaacggcagtggcataacgactgctttaactgtaagaagtgctccctctcactggtggggcgtggcttcctcacagagagggacgacatcctgtgccccgactgtgggaaagacatctgaattcaacacagagaagttgctgcttgtgatctcacacacagatttttatgttttctttctcacccaggcaatcttgccttctggtttcttccagccacattgagactttcttctagtgcttttcagtgatactcacgtttgcttaaaccctttagtgctttgtgatagttcagtcccagggaaagagaaaactcgccctaggccctaggtgggaagatggtttgaaatttttgtaatcgagtaaggcacacccaaatgtaaaaatccttttgaatgatgcctttataaatctttctctcactgtctatttaagtgcaattaacatatgtcacgaacttgaaagttttctaaactcaataaggtaatgaccagttgttatttacagctctgtaacctcccgttgcgtcaagtctaaaccaagattatgtgacttgcaataaagttattcagaacag

SEQ ID NO: 1616 - protein, 261 aa, Homo sapiens
MTRRGFSRAGAAQRSTRPAAEPQPPAARALQPRPGVPGPLRCREYLQPPAPRREAEGLSHQGSEVGAESGARPKERGAEPELGRLWLRTVSSWRLGWHFDFGVAEKPGVKMTERFDCHHCNESLFGKKYILREESPYCVVCFETLFANTCEECGKPIGCDCKVPARWSTRAAAGMRPASSATAASSQLEPRVSSPKTIRISVCPAMRNNMPCSAFSAKSPSPREGSLTGSSPGTRSASCAPPAGSSCLGSASQLAMTLPTA

SEQ ID NO: 1617 - DNA, 1416 bp, Homo sapiens
cagaaggttggggccatccaaccaggcagtccgcctgcacagcagctgtccctgctcatcgggctggaggacagaagacagaaccctaaaaccacaggttgctgaaaagccaggagtcaaaatgactgagcgctttgactgccaccattgcaacgaatctctctttggcaagaagtacatcctgcgggaggagagcccctactgcgtggtgtgctttgagaccctgttcgccaacacctgcgaggagtgtgggaagcccatcggctgtgactgcaaggacttgtcttacaaggaccggcactggcatgaagcctgtttccactgctcgcagtgcagaaactcactggtggacaagccctttgctgccaaggaggaccagctgctctgtacagactgctattccaacgagtactcatccaagtgccaggaatgcaagaagaccatcatgccaggtacccgcaagatggagtacaagggcagcagctggcatgagacctgcttcatctgccaccgctgccagcagccaattggaaccaagagtttcatccccaaagacaatcagaatttctgtgtgccctgctatgagaaacaacatgccatgcagtgcgttcagtgcaaaaagcccatcaccacgggaggggtcacttaccgggagcagccctggcacaaggagtgcttcgtgtgcaccgcctgcaggaagcagctgtctgggcagcgcttcacagctcgcgatgactttgcctactgcctgaactgcttctgtgacttgtatgccaagaagtgtgctgggtgcaccaaccccatcagcggacttggtggcacaaaatacatctcctttgaggaacggcagtggcataacgactgctttaactgtaagaagtgctccctctcactggtggggcgtggcttcctcacagagagggacgacatcctgtgccccgactgtgggaaagacatctgaattcaacacagagaagttgctgcttgtgatctcacacacagatttttatgttttctttctcacccaggcaatcttgccttctggtttcttccagccacattgagactttcttctagtgcttttcagtgatactcacgtttgcttaaaccctttagtgctttgtgatagttcagtcccagggaaagagaaaactcgccctaggccctaggtgggaagatggtttgaaatttttgtaatcgagtaaggcacacccaaatgtaaaaatccttttgaatgatgcctttataaatctttctctcactgtctatttaagtgcaattaacatatgtcacgaacttgaaagttttctaaactcaataaggtaatgaccagttgttatttacagctctgtaacctcccgttgcgtcaagtctaaaccaagattatgtgacttgcaataaagttattcagaacag

SEQ ID NO: 1618 - protein, 279 aa, Homo sapiens; identical to SEQ ID NO: 1614

SEQ ID NO: 1619 - DNA, 4346 bp, Homo sapiens
gttgtgaccactgaacaaaacttgcccattgaaagcaaacccggaacagctggataatgtccaccccgagccgattcaagaaggacaaagagatcatagccgagtatgaaagtcaagtcaaagaaattcgagctcaactggtagaacaacaaaaatgcctggagcagcaaacggagatgcgagttcagcttctccaggatctgcaagatttcttccgaaaaaaagctgaaattgagacggaatattcccggaatctagagaagttagcagaaaggttcatggcaaaaacaagaagcactaaggatcatcaacaatacaagaaagaccagaacctgttgtctccagtgaactgctggtatttgctcctgaaccaagtaaggagagaaagcaaagaccatgcaaccttgagtgacatctatctgaacaatgtgattatgcggttcatgcagataagtgaggattctaccaggatgtttaaaaagagcaaagagattgcattccaacttcatgaggatttaatgaaggttcttaatgagctttatacggtgatgaaaacataccatatgtatcatgcagagagcatcagtgcagagagcaagctgaaagaggccgaaaaacaagaggaaaagcaaattgggagatctggtgatccagtcttccatattcgactagaggagagacatcaacggcgaagctctgtaaagaaaattgaaaaaatgaaagaaaaaagacaagcaaaatattcagaaaataagctaaaatcaattaaggcacggaacgaatatctcctaacacttgaagccaccaatgcctcagttttcaagtactatattcatgatctttctgatttaattgattgctgtgatcttggctaccatgcaagtctgaacagagccctaagaacatatctgtctgcggagtacaaccttgaaacctccagacatgagggcttagacattattgagaatgcagttgataatttagagcccaggagcgataagcagagattcatggagatgtaccctgctgcgttctgtccaccaatgaagtttgagtttcagtctcacatgggtgatgaggtgtgccaggtcagtgcccagcagccagtccaggcagagctcatgctcaggtaccaacagttgcagtcccgccttgccacgctcaaaatcgagaatgaagaggttaagaaaacgactgaagccaccttgcagacgatacaagatatggtcaccatcgaggactatgatgtttctgaatgcttccagcacagtcgttccacagaatcagtgaagtccactgtctctgaaacctacctgagtaaacccagcatcgccaagagaagagccaaccagcaggaaactgaacagttctacttcatgaaactcagagaatatttggaaggcagtaatctcatcacaaaacttcaagccaaacatgacttgctgcagaggaccctgggagaaggtcatagagctgaatatatgactacaaggcctccaaatgttccccctaagccccagaaacacaggaagtccaggccccgctcacagtataatactaagttgtttaatggggatttggaaacattcgtcaaggactcaggacaggttattcccctcattgtggaaagctgtattcggttcatcaatctctatggtcttcagcatcaggggattttcagagtgtctggttcccaggtggaagtcaatgatattaaaaattcatttgagagaggtgaaaatcctttggctgatgaccagagtaaccatgatattaactcagttgctggcgttctgaagctctatttccgtgggctggaaaaccccctctttcctaaggaaagatttaacgatctgatttcttgtatcagaatagataatctctatgagagggcgcttcacatccgcaaactcctcctgactttgcccaggtcggtccttatagtgatgaggtacctctttgccttcctcaatcatctatcacagtacagcgatgagaatatgatggacccttataacctggccatttgctttggcccaacattgatgcctgtcccagaaatacaggatcaagtgtcttgccaggcacatgtgaatgaaattatcaaaaccatcatcatccaccatgagactattttcccagatgctaaagagctggatggccctgtttatgagaaatgtatggctggagatgactattgcgacagcccatacagtgagcacggtacattggaggaagtggaccaagatgctggtacagagccccacacaagtgaagatgaatgtgagccaatagaagcaatagccaagtttgactatgttgggcggtctgccagagaactatccttcaagaagggtgcctccctgctgctgtatcaccgtgcatctgaggactggtgggaaggcaggcacaacgggattgacgggctggtgcctcaccagtatatagtggtgcaggatatggatgatacgttttcagacactctgagccaaaaagccgacagtgaggccagcagtgggccagtcacggaagacaagtcctcatccaaggacatgaactccccgacagaccgtcatcctgacggctatttagccaggcaacgaaaaagaggagagccaccccctccagtaaggcgtcctggcaggaccagtgatggccattgcccgctccaccctccacatgccctttctaactcctcagttgacctagggtccccaagccttgccagtcacccccggggcctgctgcagaaccgtggcctcaacaatgacagtcctgagcggaggcgcaggcctggccatggcagcctgaccaacatcagccggcacgactccctcaagaagatcgacagccctcccattagaaggtccacgtcatcagggcaatacacgggcttcaatgaccacaagccactggacccagagacaattgctcaggatattgaagaaacgatgaacacagctttgaatgaactccgagaactggagagacagagcacagcaaagcatgcccctgatgtggtgctggataccctggagcaagtgaaaaactctcccacccctgccacttccacggaatctctcagccctttgcacaacgttgccctcaggagctccgagcctcagattcgacgtagcacgagctcctccagtgacacaatgagtactttcaagcctatggtggcacccagaatgggcgtgcagctgaagcctccagcccttaggccaaaacctgctgttcttccaaaaacaaatcctaccataggacctgccccacctccccagggtccaacagacaagtcatgcacaatgtaaaaaccagccaagcaaggccataaagggaggtgacttaaaaaagaaaatggattagtgacaaaagtcactgatccataactttccttagttttgtgcttataactggagatcttttggcttttctatgttgtcgaatgtaatgtctgagactagctaaattaacacgggcatttgtattttgtaatttttttaaataactggacatatgtcattttaaggacaatagaaacacttagacttacttgaaaatccaatgctgcaccacttgtaatgaaggcaacaccgctctccacattgtacagagcttcaggtttaatgtagcccagctgagtcagaaaggttgtgacctgaaggcagaagaacccgaatgccacacctcattggagtatagccagtgttggtctgtggcacttgggctgaaaggtgataatggcattgcgtggtagctgacaatgagcaccttcggttccatgtggagcggggtttagctcatgcaaaagacttgcaattgtctccatgggacgatcccagtgggactgtcagcccacagctcgagtgggttggatgcttgcctctttcctaacagttatttccccgggtccagcttaaagactcgatggaaggaggtagaacctctgctgttactgcttgaacttaacctgggaaaggagaggaagacaccatctccaaagctattaatgtcactccttttgcgagcatgattaggccccggagatttccaagtccccccatctacacttacaaacgattagaagggtttaattttaaagactttctggttacactactccacgaactcctccaaagatccgttattcaataactgcctagaaaatgtttccatctcctctaaatccctgtgttctcctctgtggaaatgaaggcagcaagaagcacctgaggccttggttcatgcagtgttctcttttgactaaatcacctaggttcctttaaacatgctacaaagcccaggcatggtggtgcacacctgtactcccagctactcgggtg

SEQ ID NO: 1620 - protein, 1085 aa, Homo sapiens
MSTPSRFKKDKEIIAEYESQVKEIRAQLVEQQKCLEQQTEMRVQLLQDLQDFFRKKAEIETEYSRNLEKLAERFMAKTRSTKDHQQYKKDQNLLSPVNCWYLLLNQVRRESKDHATLSDIYLNNVIMRFMQISEDSTRMFKKSKEIAFQLHEDLMKVLNELYTVMKTYHMYHAESISAESKLKEAEKQEEKQIGRSGDPVFHIRLEERHQRRSSVKKIEKMKEKRQAKYSENKLKSIKARNEYLLTLEATNASVFKYYIHDLSDLIDCCDLGYHASLNRALRTYLSAEYNLETSRHEGLDIIENAVDNLEPRSDKQRFMEMYPAAFCPPMKFEFQSHMGDEVCQVSAQQPVQAELMLRYQQLQSRLATLKIENEEVKKTTEATLQTIQDMVTIEDYDVSECFQHSRSTESVKSTVSETYLSKPSIAKRRANQQETEQFYFMKLREYLEGSNLITKLQAKHDLLQRTLGEGHRAEYMTTRPPNVPPKPQKHRKSRPRSQYNTKLFNGDLETFVKDSGQVIPLIVESCIRFINLYGLQHQGIFRVSGSQVEVNDIKNSFERGENPLADDQSNHDINSVAGVLKLYFRGLENPLFPKERFNDLISCIRIDNLYERALHIRKLLLTLPRSVLIVMRYLFAFLNHLSQYSDENMMDPYNLAICFGPTLMPVPEIQDQVSCQAHVNEIIKTIIIHHETIFPDAKELDGPVYEKCMAGDDYCDSPYSEHGTLEEVDQDAGTEPHTSEDECEPIEAIAKFDYVGRSARELSFKKGASLLLYHRASEDWWEGRHNGIDGLVPHQYIVVQDMDDTFSDTLSQKADSEASSGPVTEDKSSSKDMNSPTDRHPDGYLARQRKRGEPPPPVRRPGRTSDGHCPLHPPHALSNSSVDLGSPSLASHPRGLLQNRGLNNDSPERRRRPGHGSLTNISRHDSLKKIDSPPIRRSTSSGQYTGFNDHKPLDPETIAQDIEETMNTALNELRELERQSTAKHAPDVVLDTLEQVKNSPTPATSTESLSPLHNVALRSSEPQIRRSTSSSSDTMSTFKPMVAPRMGVQLKPPALRPKPAVLPKTNPTIGPAPPPQGPTDKSCTM

SEQ ID NO: 1621 - DNA, 4221 bp, Homo sapiens
atgtccaccccgagccgattcaagaaggacaaagagatcatagccgagtatgaaagtcaagtcaaagaaattcgagctcaactggtagaacaacaaaaatgcctggagcagcaaacggagatgcgagttcagcttctccaggatctgcaagatttcttccgaaaaaaagctgaaattgagacggaatattcccggaatctagagaagttagcagaaaggttcatggcaaaaacaagaagcactaaggatcatcaacaatacaagaaagaccagaacctgttgtctccagtgaactgctggtatttgctcctgaaccaagtaaggagagaaagcaaagaccatgcaaccttgagtgacatctatctgaacaatgtgattatgcggttcatgcagataagtgaggattctaccaggatgtttaaaaagagcaaagagattgcattccaacttcatgaggatttaatgaaggttcttaatgagctttatacggtgatgaaaacataccatatgtatcatgcagagagcatcagtgcagagagcaagctgaaagaggccgaaaaacaagaggaaaagcaaattgggagatctggtgatccagtcttccatattcgactagaggagagacatcaacggcgaagctctgtaaagaaaattgaaaaaatgaaagaaaaaagacaagcaaaatattcagaaaataagctaaaatcaattaaggcacggaacgaatatctcctaacacttgaagccaccaatgcctcagttttcaagtactatattcatgatctttctgatttaattgattgctgtgatcttggctaccatgcaagtctgaacagagccctaagaacatatctgtctgcggagtacaaccttgaaacctccagacatgagggcttagacattattgagaatgcagttgataatttagagcccaggagcgataagcagagattcatggagatgtaccctgctgcgttctgtccaccaatgaagtttgagtttcagtctcacatgggtgatgaggtgtgccaggtcagtgcccagcagccagtccaggcagagctcatgctcaggtaccaacagttgcagtcccgccttgccacgctcaaaatcgagaatgaagaggttaagaaaacgactgaagccaccttgcagacgatacaagatatggtcaccatcgaggactatgatgtttctgaatgcttccagcacagtcgttccacagaatcagtgaagtccactgtctctgaaacctacctgagtaaacccagcatcgccaagagaagagccaaccagcaggaaactgaacagttctacttcatgaaactcagagaatatttggaaggcagtaatctcatcacaaaacttcaagccaaacatgacttgctgcagaggaccctgggagaaggtcatagagctgaatatatgactacaagccgaggacgaagaaactcgcacacaagacatcaggactcaggacaggttattcccctcattgtggaaagctgtattcggttcatcaatctctatggtcttcagcatcaggggattttcagagtgtctggttcccaggtggaagtcaatgatattaaaaattcatttgagagaggtgaaaatcctttggctgatgaccagagtaaccatgatattaactcagttgctggcgttctgaagctctatttccgtgggctggaaaaccccctctttcctaaggaaagatttaacgatctgatttcttgtatcagaatagataatctctatgagagggcgcttcacatccgcaaactcctcctgactttgcccaggtcggtccttatagtgatgaggtacctctttgccttcctcaatcatctatcacagtacagcgatgagaatatgatggacccttataacctggccatttgctttggcccaacattgatgcctgtcccagaaatacaggatcaagtgtcttgccaggcacatgtgaatgaaattatcaaaaccatcatcatccaccatgagactattttcccagatgctaaagagctggatggccctgtttatgagaaatgtatggctggagatgactattgcgacagcccatacagtgagcacggtacattggaggaagtggaccaagatgctggtacagagccccacacaagtgaagatgaatgtgagccaatagaagcaatagccaagtttgactatgttgggcggtctgccagagaactatccttcaagaagggtgcctccctgctgctgtatcaccgtgcatctgaggactggtgggaaggcaggcacaacgggattgacgggctggtgcctcaccagtatatagtggtgcaggatatggatgatacgttttcagacactctgagccaaaaagccgacagtgaggccagcagtgggccagtcacggaagacaagtcctcatccaaggacatgaactccccgacagaccgtcatcctgacggctatttagccaggcaacgaaaaagaggagagccaccccctccagtaaggcgtcctggcaggaccagtgatggccattgcccgctccaccctccacatgccctttctaactcctcagttgacctagggtccccaagccttgccagtcacccccggggcctgctgcagaaccgtggcctcaacaatgacagtcctgagcggaggcgcaggcctggccatggcagcctgaccaacatcagccggcacgactccctcaagaagatcgacagccctcccattagaaggtccacgtcatcagggcaatacacgggcttcaatgaccacaagccactggacccagagacaattgctcaggatattgaagaaacgatgaacacagctttgaatgaactccgagaactggagagacagagcacagcaaagcatgcccctgatgtggtgctggataccctggagcaagtgaaaaactctcccacccctgccacttccacggaatctctcagccctttgcacaacgttgccctcaggagctccgagcctcagattcgacgtagcacgagctcctccagtgacacaatgagtactttcaagcctatggtggcacccagaatgggcgtgcagctgaagcctccagcccttaggccaaaacctgctgttcttccaaaaacaaatcctaccataggacctgccccacctccccagggtccaacagacaagtcatgcacaatgtaaaaaccagccaagcaaggccataaagggaggtgacttaaaaaagaaaatggattagtgacaaaagtcactgatccataactttccttagttttgtgcttataactggagatcttttggcttttctatgttgtcgaatgtaatgtctgagactagctaaattaacacgggcatttgtattttgtaatttttttaaataactggacatatgtcattttaaggacaatagaaacacttagacttacttgaaaatccaatgctgcaccacttgtaatgaaggcaacaccgctctccacattgtacagagcttcaggtttaatgtagcccagctgagtcagaaaggttgtgacctgaaggcagaagaacccgaatgccacacctcattggagtatagccagtgttggtctgtggcacttgggctgaaaggtgataatggcattgcgtggtagctgacaatgagcaccttcggttccatgtggagcggggtttagctcatgcaaaagacttgcaattgtctccatgggacgatcccagtgggactgtcagcccacagctcgagtgggttggatgcttgcctctttcctaacagttatttccccgggtccagcttaaagactcgatggaaggaggtagaacctctgctgttactgcttgaacttaacctgggaaaggagaggaagacaccatctccaaagctattaatgtcactccttttgcgagcatgattaggccccggagatttccaagtccccccatctacacttacaaacgattagaagggtttaattttaaagactttctggttacactactccacgaactcctccaaagatccgttattcaataactgcctagaaaatgtttccatctcctctaaatccctgtgttctcctctgtggaaatgaaggcagcaagaagcacctgaggccttggttcatgcagtgttctcttttgactaaatcacctaggttcctttaaacatgctacaaagcccaggcatggtggtgcacacctgtactcccagctactcgggtg

SEQ ID NO: 1622 - protein, 1062 aa, Homo sapiens
MSTPSRFKKDKEIIAEYESQVKEIRAQLVEQQKCLEQQTEMRVQLLQDLQDFFRKKAEIETEYSRNLEKLAERFMAKTRSTKDHQQYKKDQNLLSPVNCWYLLLNQVRRESKDHATLSDIYLNNVIMRFMQISEDSTRMFKKSKEIAFQLHEDLMKVLNELYTVMKTYHMYHAESISAESKLKEAEKQEEKQIGRSGDPVFHIRLEERHQRRSSVKKIEKMKEKRQAKYSENKLKSIKARNEYLLTLEATNASVFKYYIHDLSDLIDCCDLGYHASLNRALRTYLSAEYNLETSRHEGLDIIENAVDNLEPRSDKQRFMEMYPAAFCPPMKFEFQSHMGDEVCQVSAQQPVQAELMLRYQQLQSRLATLKIENEEVKKTTEATLQTIQDMVTIEDYDVSECFQHSRSTESVKSTVSETYLSKPSIAKRRANQQETEQFYFMKLREYLEGSNLITKLQAKHDLLQRTLGEGHRAEYMTTSRGRRNSHTRHQDSGQVIPLIVESCIRFINLYGLQHQGIFRVSGSQVEVNDIKNSFERGENPLADDQSNHDINSVAGVLKLYFRGLENPLFPKERFNDLISCIRIDNLYERALHIRKLLLTLPRSVLIVMRYLFAFLNHLSQYSDENMMDPYNLAICFGPTLMPVPEIQDQVSCQAHVNEIIKTIIIHHETIFPDAKELDGPVYEKCMAGDDYCDSPYSEHGTLEEVDQDAGTEPHTSEDECEPIEAIAKFDYVGRSARELSFKKGASLLLYHRASEDWWEGRHNGIDGLVPHQYIVVQDMDDTFSDTLSQKADSEASSGPVTEDKSSSKDMNSPTDRHPDGYLARQRKRGEPPPPVRRPGRTSDGHCPLHPPHALSNSSVDLGSPSLASHPRGLLQNRGLNNDSPERRRRPGHGSLTNISRHDSLKKIDSPPIRRSTSSGQYTGFNDHKPLDPETIAQDIEETMNTALNELRELERQSTAKHAPDVVLDTLEQVKNSPTPATSTESLSPLHNVALRSSEPQIRRSTSSSSDTMSTFKPMVAPRMGVQLKPPALRPKPAVLPKTNPTIGPAPPPQGPTDKSCTM

SEQ ID NO: 1623 - DNA, 2132 bp, Homo sapiens
agaagccgcttataaattaccgcttccttcgcgccgccgccaacgccgagccccgaggaccgcaagcccagaggacaagctgcgccaagagggagtgctggagctgttcacccagcgggtcagagagcgagccgggcaggccagcccccggccggcggaaccctggcacagcctgagcagatgctgcgggcggcgccgcagccaccccagatccagaaccagaaccacagcccttctgaggagctcccaaacaaagcaaggagatggccaccaaggagaagctgcagtgtctgaaagatttccacaaggacatcctgaagccctcaccagggaagagcccaggcacgcggcctgaggacgaggctgagggaaaacctccgcagagggagaagtggtctagcaagatcgactttgtgctctctgtggctggcggcttcgtgggcttgggcaacgtctggcgcttcccgtacctctgctacaagaatggtggaggtgcgtttctcataccgtattttattttcctgtttgggagcggcctgcctgtgtttttcttggagatcatcataggccagtacacctctgaagggggcatcacctgctgggaaaagatctgccccttgttctctggtatcggctatgcctccgttgtaattgtgtccctcctgaatgtctactacatcgtcatcctggcctgggccacatactacctgttccagtccttccagaaggagctgccctgggcacactgcaaccacagctggaacacacctcactgcatggaggacaccatgcgcaagaacaagagtgtctggatcaccatcagctccaccaacttcacctcccctgtcatcgagttctgggagcgcaacgtgctgagcttgtcccctggaatcgaccacccaggctctctgaaatgggacctcgctctctgccttcttttagtctggctagtgtgtttcttctgcatctggaagggcgtcaggtccactgggaaggtcgtctacttcacagccacttttccattcgccatgctcctggtgctgctggtccgagggctgacgctgccgggcgcgggcgcaggcatcaagttctatctgtatcctgacatcacccgccttgaggacccacaggtgtggattgacgctgggactcagatattcttctcttatgccatctgcctgggggctatgacctcgctggggagctacaacaagtacaagtataactcgtacaggcaagtggactgtatgctgctgggatgcctgaacagtggtaccagttttgtgtctggcttcgcaattttttccatcctgggcttcatggcacaagagcaaggggtggacattgctgatgtggctgagtcaggtcctggcctggccttcattgcctacccaaaagctgtgacaatgatgccgctgcccacattttggtccattcttttttttattatgcttctcttgcttggactggatagccagtttgttgaagttgaaggacagatcacatccttggttgatctttacccatccttcctaaggaagggttatcgtcgggaaatcttcatcgccttcgtgtgtagcatcagctacctgctggggctgacgatggtgacggagggtggcatgtatgtgtttcagctctttgactactatgcagctagcggtgtatgccttttgtgggttgcattctttgaatgttttgttattgcctggatatatggaggtgataacctttatgatggtattgaggacatgattggctatcggcccgggccctggatgaagtacagctgggctgtgatcactccagttctctgtgttggatgtttcatcttctcgctcgtcaagtacgtacccctgacctacaacaaaacatacgtgtaccccaactgggccattgggctgggctggagcctggccctttcctccatgctctgcgttcccttggtcatcgtcatccgcctctgccagactgaggggccgttccttgtgagagtcaagtacctgctgaccccaagggaacccaaccgctgggctgtggagcgcgagggagccacaccttacaactctcgcaccgtcatgaacggcgctctcgtgaaaccgacccacatcattgtggagaccatgatgtga

SEQ ID NO: 1624 - protein, 622 aa, Homo sapiens [sequence omitted]

SEQ ID NO: 1625 - DNA, 3964 bp, Homo sapiens
gaaagcaaggagatggccaccaaggagaagctgcagtgtctgaaagatttccacaaggacatcctgaagccctcaccagggaagagcccaggcacgcggcctgaggacgaggctgagggaaaacctccgcagagggagaagtggtctagcaagatcgactttgtgctctctgtggctggcggcttcgtgggcttgggcaacgtctggcgcttcccgtacctctgctacaagaatggtggaggtgcgtttctcataccgtattttattttcctgtttgggagcggcctgcctgtgtttttcttggagatcatcataggccagtacacctctgaagggggcatcacctgctgggaaaagatctgccccttgttctctggtatcggctatgcctccgttgtaattgtgtccctcctgaatgtctactacatcgtcatcctggcctgggccacatactacctgttccagtccttccagaaggagctgccctgggcacactgcaaccacagctggaacacacctcactgcatggaggacaccatgcgcaagaacaagagtgtctggatcaccatcagctccaccaacttcacctcccctgtcatcgagttctgggagcgcaacgtgctgagcttgtcccctggaatcgaccacccaggctctctgaaatgggacctcgctctctgccttcttttagtctggctagtgtgtttcttctgcatctggaagggcgtcaggtccactgggaaggtcgtctacttcacagccacttttccattcgccatgctcctggtgctgctggtccgagggctgacgctgccgggcgcgggcgcaggcatcaagttctatctgtatcctgacatcacccgccttgaggacccacaggtgtggattgacgctgggactcagatattcttctcttatgccatctgcctgggggctatgacctcgctggggagctacaacaagtacaagtataactcgtacaggcaagtggactgtatgctgctgggatgcctgaacagtggtaccagttttgtgtctggcttcgcaattttttccatcctgggcttcatggcacaagagcaaggggtggacattgctgatgtggctgagtcaggtcctggcctggccttcattgcctacccaaaagctgtgacaatgatgccgctgcccacattttggtccattcttttttttattatgcttctcttgcttggactggatagccagtttgttgaagttgaaggacagatcacatccttggttgatctttacccatccttcctaaggaagggttatcgtcgggaaatcttcatcgccttcgtgtgtagcatcagctacctgctggggctgacgatggtgacggagggtggcatgtatgtgtttcagctctttgactactatgcagctagcggtgtatgccttttgtgggttgcattctttgaatgttttgttattgcctggatatatggaggtgataacctttatgatggtattgaggacatgattggctatcggcccgggccctggatgaagtacagctgggctgtgatcactccagttctctgtgttggatgtttcatcttctcgctcgtcaagtacgtacccctgacctacaacaaaacatacgtgtaccccaactgggccattgggctgggctggagcctggccctttcctccatgctctgcgttcccttggtcatcgtcatccgcctctgccagactgaggggccgttccttgtgagagtcaagtacctgctgaccccaagggaacccaaccgctgggctgtggagcgcgagggagccacaccttacaactctcgcaccgtcatgaacggcgctctcgtgaaaccgacccacatcattgtggagaccatgatgtgagctctctcgggtcgacggggccggcggctttcctgctgtttactaacattagattctcataggaccaggtttacagagctttatatttgcactaggatttttttttttttgtaattgtcacagaaaatgtaattgtgggtatgtgtgcgtgcgtgtgtgtgtgtgtgtgtatcgtgtgtgtgtgttttgttttgatttgggggatattttgtacaaaaagaaaacccacgggaagatgtccgtggagaggcagagctttcatactgaattagatgtattttatgggaatttggtaaatttttctttgtatttttttttttacatataagtatatatacacttagagattgtcatatacttttaccacttgaattgatcttcttgccagcaatagatctcattttcaaaagcaattcttcggtgctgtgtagctggcagaaagttctgtccagtaaacgcaggatggaattttcctgggactctacacccatcttaaggtggtataccttccaaatcctggttcagatggaagaaatagcaggagagaggacccattagctggcagacccagggggaagaaaggagggctgtgaggagatacctcattaaacttggcttagtgaagaagagagatgccaaaggaatgaaccaacccttcacataaaggagactggctgaagctgaatgaggaggccctatagcagaagtctgattctaagagcagtagaaacttgtaccagaagcaaaatcccacttttaattttgagatggtgagtggatagtcagtagaccgtcagaaccactggccagagagggagctgctagagatccaagaaggctggcaggagtgaggctcacaactcagcctcgcaagaggtggcagaggcacaggaggccacagtccttcctggggcattccaggcagagaaggagcagaggctctcccggcaggagctggggtctcagggctcagatgagtctgttgcatttgaatggggtcatagcaggttctggtcattccccaagcaacatctcagcatctcttaaagttgcctgcaggaatgaagcatgacatacctgttgagggactaggggagtggtggggaggtgagtggaccaaaggatataggccccaggcatgcagatgggcccggtgtcggggaggggtgctttctttcctcatctccccactccccactctcagcctgggagactcctgccaagccctcattaaagatgccaccctgggctgccctggcacctagcaaggcacaccaagaacagcttttgagtctgtatcctccactgggggaagtgctcccagttcagaacaagggcagcccgtggtgctgacctaggatataacaaagctcttcacttcaaaacccctgcaatagctgggtttacagacatttaccacctgcggacccaaaagagaaggcctaggagagttttctagaaggttgggattgtcagggtcctggcccctcagaactggcttgatcaagggccttatgtggagcagaggttgtctctgaaccaggagagaaggtactatacctttcaaatccccagggcagacacacccccacccagcccctatttggacctaaactgtgccatttgaacagtcacttccaagctcagtctaaatgaaaccgaaacgtgaccacgcacaaaggcagtcactgcctcgaggggtgcagaccgcagaattttcacagcaggggctcttggaaccctggaaacccccttcttaaatttgggaggaggagtatgcctttggtgtccccctcccaaggggcaattctgaaccccatctttggcaggcatacatatttcactgtttccaaagctatctactctgccaaacaacacccagtcctattccaaactctcaacgattctatcttgttcctgtttttctatgtatttatggttgccgtttgtgtctgatttgattttactgttttttccctgattttatggagtagcattgtgacctgttttcctttgtcttatataactttagtaaactaaccactgtcaatgattgagggcaggtggcacgtggggaagaggg

SEQ ID NO: 1626 - protein, 622 aa, Homo sapiens [sequence omitted]

SEQ ID NO: 1627 - DNA, 4046 bp, Homo sapiens
cctccggccactgccgccgcggtcgcctctcacccgcccggccgctccagcccgaggcgccccgaccccgcgccactccgcgcccggccagccgcccgcagccatggggctcctgcccaagctcggcgcgtcccagggcagcgacacctctactagccgagccggccgctgtgcccgctcggtcttcggcaacattaaggtgtttgtgctctgccaaggcctcctgcagctctgccaactcctgtacagcgcctacttcaagagcagcctcaccaccattgagaagcgctttgggctctccagttcttcatcgggtctcatttccagcttgaatgagatcagcaatgccatcctcatcatctttgtcagctactttggcagccgggtgcaccgtccacgtctgattggcatcggaggtctcttcctggctgcaggtgccttcatcctcaccctcccacacttcctctccgagccctaccagtacaccttggccagcactgggaacaacagccgcttgcaggccgagctctgccagaagcattggcaggacctgcctcccagtaagtgccacagcaccacccagaacccccagaaggagaccagcagcatgtggggcctgatggtggttgcccagctgctggctggcatcgggacagtgcctattcagccatttgggatctcctatgtggatgacttctcagagcccagcaactcgcccctgtacatctccatcttatttgccatctctgtatttggaccggctttcgggtacctgctgggctctgtcatgctgcagatctttgtggactatggcagggtcaacacagctgcagttaacttggtcccgggtgacccccgatggattggagcctggtggctaggcctgctcatttcttcagctttattggttctcacctctttccccttttttttcttccctcgagcaatgcccataggagcaaagagggctcctgccacagcagatgaagcaaggaagttggaggaggccaagtcaagaggctccctggtggatttcattaaacggtttccatgcatctttctgaggctcctgatgaactcactcttcgtcctggtggtcctggcccagtgcaccttctcctccgtcattgctggcctctccaccttcctcaacaagttcctggagaagcagtatggcacctcagcagcctatgccaacttcctcattggtgctgtgaacctccctgctgcagccttggggatgctgtttggaggaatcctcatgaagcgctttgttttctctctacaagccattccccgcatagctaccaccatcatcaccatctccatgatcctttgtgttcctttgttcttcatgggatgctccaccccaactgtggccgaagtctacccccctagcacatcaagttctatacatccgcagtctcctgcctgccgcagggactgctcgtgcccagattctatcttccacccggtctgtggagacaatggaatcgagtacctctccccttgccatgccggctgcagcaacatcaacatgagctctgcaacctccaagcaactgatctatttgaactgcagctgtgtgaccgggggatccgcttcagcaaagacaggatcgtgccctgtcccctgtgcccacttcctgctcccggccatcttcctcatctccttcgtgtccctgatagcctgcatctcccacaaccccctctacatgatggttctgcgtgtggtgaaccaggaggaaaagtcatttgccatcggggtgcagttcttgttgatgcgcttgctggcctggctgccatctccagccctctatggcctcaccattgaccactcctgcatccggtggaactcgctgtgcttggggaggcgaggggcctgcgcctactatgacaacgatgctctccgagacaggtacctgggcctgcagatgggctacaaggcgctgggcatgctgctgctttgcttcatcagctggagggtgaagaagaacaaggagtacaacgtgcagaaggcggcaggcctcatctgaccccaccctgggccactgccctgctccagagagtggaccttgactcttccacacctgcctatactcactaatgttaacacgtcatttcctttttgtatttttaaacaagaaagaaaaccccagtcctcatttgccttccctacctcttcctcccagagtcctccccacagttcctaagggccactgtgtacccgggctgtgtgggccagaactggggggctgagtcttccctggccccttggaagaggcccccagatgcccaggctcacttcagtgttgagtcctccattgaggatgcccactgaggcagccaggcccctcaccagccctggggggaatcctaaacagagagagaaaaagggtatctgcccttcttgccaggcagctccactctcccgctgactgcccacaccctgcagagtggcaggggtgaaaggaagaaggaagtggctgagttattaatagccagagccactgggagactggggagactggctgtaacccccttcacacctgggtttggcatcagcacagactacgggaggggctggctccctccccctcagaccctcacttcctgtacctagaggccattctggatgctgccatgttgggaagtacagtctctgcccattacctgcatgcaggcaccagagcagggactgagaaaccccaaggatgggtcatctaagtgctgtccatatgaaccctggactttctgtccttagatcctcacatgttatccctgtctttctggggtacgtttcaaactgaggaagctacaacacagtgaagacccaaggaaggcctatgaaaaggtcctgatgcccaacctcccaccccttcaatgtggggacgagaccccctcatctcagagtaatgggaagaacctcccacatctccctggcagcagatgaggtggcttcacatgcacttccctgtctggacttcagcccgtattccgaggagtagagaggcagaagagatgtcagcaaagcaagtgatgaagcagagtggatgtccactgtcaccaagctggatggcaagctgcggcccacaaaacagccagtcaggttggctttcctggtttcagacatgctcataccattcccattttctcagcctcttctcactgcctccagagaggtgggtgcctgggttgagagacacagctgctacgtgatagatgttgagagacagaagccaacgaaggaggtcattcatcaacaaatatatttattggagaccgactttgtgcaaagcaatgctaatcagggttctccatggagcttccctcagctcttacctcacctccctccatttacattagggccttctcccagggtgtgctcggtgggcagtgtgggactgggggtgtgggagttggtgagagcaggaggagaggtggggacagcaagaagccacagattggcatgaaggatcctgacctgactatccatgccatccatggcccccagactgactctgcacctggccctttgccagacagctctgtctccccatgtcctctggaacagctgggcatgggtcatggccattcatgacccttaagtgccacccttcttggaagaccccctccagaagcatactggaagccacctctggaaaagcctcatatggtgatatgccaaaatatttatgtcaatgtccaaacaaagtccaatgccatgagactgaagtctttgtggaaaccactgttacagacaagcttatttccaaagccacctcatttccaaacatctcactcaggaagggaggctcaatgtaacctcaggggccagttttagcatttgaaatggttctgcttggaaaatgatgccctgcaactaaccctggtctttcccatggcaatttaaccacatttggaaggcactgccttcagctgagtttatgaacaatgaatgccaaccttcaggttctagaagattggttgcactcccaaacctttattctattatattactattaaaatattctaattttgctattg

SEQ ID NO: 1628 - protein, 643 aa, Homo sapiens [sequence omitted]

SEQ ID NO: 1629 - DNA, 2649 bp, Homo sapiens
atggtgaactgcaccatcaagtcagaggagaagaaagagccttgccacgaggccccccagggctcagccactgccgctgaacctcagcctggagacccagcccgggcctcccaggatagtgctgacccccaagctccagcccaggggaatttcaggggctcctgggactgtagctctccagagggtaatgggtccccagaacccaagagaccaggagtgtcggaggctgcctctggaagccaggagaagctggacttcaaccgaaatttgaaagaagtggtgccagccatagagaagctgttgtccagtgactggaaggagaggtttctaggaaggaactctatggaagccaaagatgtcaaagggacccaagagagcctagcagagaaggagctccagcttctggtcatgattcaccagctgtccaccctgcgggaccagctcctgacagcccactcggagcagaagaacatggctgccatgctgtttgagaagcagcagcagcagatggagcttgcccggcagcagcaggagcagattgcaaagcagcagcagcagctgattcagcagcagcataagatcaacctccttcagcagcagatccagcaggttaacatgccttatgtcatgatcccagccttccccccaagccaccaacctctgcctgtcacccctgactcccagctggccttacccattcagcccattccctgcaaaccagtggagtatccgctgcagctgctgcacagcccccctgccccagtggtgaagaggcctggggccatggccacccaccaccccctgcaggagccctcccagcccctgaacctcacagccaagcccaaggcccccgagctgcccaacacctccagctccccaagcctgaagatgagcagctgtgtgccccgcccccccagccatggaggccccacgcgggacctgcagtccagccccccgagcctgcctctgggcttccttggtgaaggggacgctgtcaccaaagccatccaggatgctcggcagctgctgcacagccacagtggggccttggatggctcccccaacacccccttccgtaaggacctcatcagcctggactcatccccagccaaggagcggctggaggacggctgtgtgcacccactggaggaagccatgctgagctgcgacatggatggctcccgccacttccccgagtcccgaaacagcagccacatcaagaggcccatgaacgccttcatggtgtgggccaaggatgagcggaggaagatcctgcaagccttcccagacatgcacaactccagcatcagcaagatccttggatctcgctggaagtccatgaccaaccaggagaagcagccctactatgaggaacaggcgcggctgagccggcagcacctggagaagtatcctgactacaagtacaagccgcggcccaagcgcacctgcatcgtggagggcaagcggctgcgcgtgggagagtacaaggccctgatgaggacccggcgtcaggatgcccgccagagctacgtgatccccccgcaggctggccaggtgcagatgagctcctcagatgtcctgtaccctcgggcagcaggcatgccgctggcacagccactggtggagcactatgtccctcgtagcctggaccccaacatgcctgtgatcgtcaacacctgcagcctcagagaggagggtgagggcacagatgacaggcactcggtggctgatggcgagatgtaccggtacagcgaggacgaggactcggagggcgaagagaagagcgatgggtggtggtgctcacagactgatcccctgggtgggcctggccccttctcctctggggaagaccttgtcccaactcgatgggcacagccagccaacctaagactatgttggtacttggacttgttcgtgccccagatgggcaaagctgtgcacttggatacattcatgaggggagaggcgccctcccttcctgaggaggttggcctgggtgggcaggaactgcagtatggccatgggctgagcaggctgagcacctcagcctttagggcttatggccaggggacactgtatgactctcctctcctgcaggtgtctatccacctggggtatggcatctaccgacctgtctccctggggtcacatgctttgtttccattcttgtcctggctggaccagccactgtgggaccaacacccctcccacactcccccagactgctcgtctatcaccaggatcgctttgtactttgtgcaaaagggtctggctgtcccttgctgttttcatctctgccaagcctattgtctggctgctgtatgtgtgcgcgtgcacgtgtgtgtgtttcatctgttcattcactgcacaagatatttattgagtgcccactacgtgccaggcactgttgctgagttcctgtgggtgtgtctctcgatgccactcctgcttctctgggggcctctttctgtgcttctctttgtccccaaattgctacctctttgtcagtctgggtgtctcaggttctgtgtgtccttgtgtgcatttctgtctctctctgtcctcgtctctctgcaaggccctctatttctctctcttggtgtctgtcctttgccccctgtgccctctggattctctgggtctatgtag

SEQ ID NO: 1630 - protein, 882 aa, Homo sapiens [sequence omitted]

SEQ ID NO: 1631 - DNA, 4704 bp, Homo sapiens
atggtcaggatctggacaacgataatgatagtattaatcctcctattaagaatcggcccaaacaaaccctcgctgtcagggcgacaggcgcccgcccaagcccagacctcggacctggttccaagcctgttcccgctgggtctctgggcgcccggtttctgcacctggagctcgcccgatgaggacaagaggccgaggaagccggttccggggacgggcaacagggactcagggaccagaaggcggctgcaggacgcgaccgagcaggaccccaggcccgggaacgacgtcgcgagcgctgagactgccgggcctcccagcccatctggcattcgagcgcaggaccgggcgccccggcaccgccgcgcgccacccgctaggatgccggtggccccagcgccctcagccgacggagagccgctgcaggaacagggaggaggccttttccaccgcacccggagcgtttacaacgggctggagctgaatacctggatgaaagtggagaggctgttcgtggagaagttccatcagtcgttttccttggacaattaacaagttaggcttccacagtgccagggcctggggatgctggacgtgggagagggttgtggtcgttagcctgggaaaatcattcttttaaacaatattcgccggaaaattagttttttcctaacatttctcaaacaaggcaattagggccgtcagaatcggtgctggaagacgaagtccccacagtgcaataatgaggttcccacggaaaatcagtacgttgtgttcgtaactgagataacagctagagaaggggctttgggctttttgagtctcccaatagtcagtctctctctctctctctctctctctcttcctctgactttctggctttggacactcccaatggtatatttctttgtggtgtttttatatttggatataagagaggaacttcttgttggatttttaagggaacacacttcgttttgacccttccaataaggaaaggggagctacaggaacagagagctctttagaaggttacttttaaatggaggcccccccattcatggtacccactcccacttggacctctgagacctccagaattaggcatcattctaaaatctggacattagaagtcacagactttgtatataaccacatattcataatttatcttttcaatgttttttattcatagatgaaaatcttgcaggcatagttaagaaaaatataattcctagaaagtacaagggaaggattatgctctgcagatacatgactaacaaggatagctggccatgcccagggctggtgttggttgaggaggtggtgatggtgcggggcatgtgtgtgtgtgtgtgtgtgtgcgcttgaggagttgtggaagtgttcatatctgtaaagtattatttcatggatgcagaccttaatgctaggttgaataactttgttgccatagaagaagaaccgcacgtcaggcttttttcattagcaaaccagtaagcactcactttgggcctctgaaatcacttccatcacctaacaccagagatacaaactgaagctagcccttaagagcctccccctaagatttagagagaatgatttctcaaccagttttcatctttgaaagtgccatttctccctttatcattgtgatttttattcaaatgcatgagtctctgattttctaccatatacaaagggtagagactacagtttcctatagaagaaacttcacatagtggccgaaggatcttatttctcaaaattcaggaactggtttcctctttctggaaattatgacattaacttgatttcatggtatctctttcatcttcctcaatgcctgtgctgtatgtatatttttattatatactgtaggtatatttttattaccaaaaaaaggagaatttgagcatgccacaatcttgaaaaatctgaggttgccctgctgtagaaccctttaactgccaggactttgtactgtttcccaagtgttaccagagccaggccgccagccttatgcagtctgtttaccttagctggaaccagggtgctgtgctgtgggttctatgaaactttctgtttcttcatatttggctttgtaattcctttcttatcagttttggaggcatttcctattattcctctgccatatgttttctgccaaattaattgccttaagattttccttaagcttttggaaatgtataatgtttgagaaaaaagaaaaagaatagactgagtggaatcgtatctagtttcagttaataacatgtttcagttgatgttactgttatagctactgggcataaagtctccttcccttttttgaatcctatttttgaggcattgaagctgtgtctgtaagagacaataggccagttgggttaaatcagtgacgagattgtccagtgcagattggtgcccagtgagtggatcttcactgctcacaggccggactggggtcagctcacacagcgaggtgacggtccgctcctcaagcagtggatggtgctcttcggccttgcagatgccgctccattttcctggcttcaaaattttccagatatttcagtgcccccagaatgacatgctaacattctgctggcatgggagcatgaggcagtttgtctctaaaacatgccagagaatctcttgtcactacctaggcaaagaaccagtggcaaggtggcagcctcccaaagagctcatccctaatgtgacatcctggaatcagatggcacggacaccggcccagccccttcccagctctgtgactaaggacaagtgacaccccccctcccccagcctcggtctcctcctgtgtacattcagaaggcagatgctgccatgaggccatgtgtgctatgtccatggtgcaaggtggcacgcatgccgagtcaccaggtgagactgccgctttgggaagggataggaaggatctccggtagccttcgtgggcaggatgcctcttatttgaatgtgcctttagccacctcacagagcctatttccacatccctgtggattcatccctgtggaaatcttgagaatcatttatcctatgctgtcatgaagcagcagcagaatggagaaggtttaaaaagactcatggacaggcaaagcggtcaaacacctcctggctcagacgcacttgccttcccacacacaagtctggaagctcaggatggtgttcacggaggcagatgctcggggccggggcctgagtttcctggggcacagcctccatatctggggttccctggactatgcccagatagctcataatgtcccagccttatttgtgatggagaaggacttggggaaaagccaccgggaagcagtaagtctaaccagggaagtgcactgacttgcatgctttgaagaagagaagggagaaaagatacaaaaccctcacctggtttgtctgtaacagttgttatttctcaggggagctgcattaatgggccaagcctgtgcagctgggtgtgtgaagcatgcattttgcaatggactgtctccaaaagcagagcgaggtcacccaagaaatctagagcaagggaaaatactcattagcaaaggaattttgctggagccttgtaacggccgactcattatttcctttccaagttattttaaatgaaattttaaaaaacatcttgctttccaagaaattttgcttgttggcatatgtttggtgttttgattcagtttggaggatgaactagttaatttccctgggagtacatgcctattaaaaatatagcatcctgcatctgaccaagatgctatcttactatcttattgtgcctatcttttatgcggagagagaaaggggggtgttgggaaggagaccagactgtggaaacattttctttattttttctctttttcttccttttatagtttgtttatttttcaacttgacatgggtagagaaagcgaatcgctagtatagaaagcacatctggaatccatccggcctcctctctctggctcaccctcctcccagcaatgtttctccttggaagttgggggaaggtaggcacctctgaccttggcagggtctaacttggggtcatccactgcatactcatcttccagaaggcgtcttattcctcctcgacaaaaaaaaaatgtgttggtattaaaatgctttgaggtaggctggatgaacccagcttagtgaggatgacatgaaaacccttagctaatggggtctttattgagtagaactcaggtaagttcagatgtaagcagtgtctctcagtaaacatgaaaagactgaagatgcagacaatcaaatacttaagtctcttgaagagctgggtggtgggcgggggtcttcccaggtggtcagggagatgtgttagtgtagcacttggaagagagtggaacgaccaggcaaggatgtgccgtggaggtgggcagtgggagcagcccagtgtcagcatctgtattggttagaagaccaccgctaatgaggaggagcgtctctaccctgcagctgtctgtactcctgtgtcttccgtaatgtgccaagctctctgaatatatgcaaaactagtctgcaaaaagccatatgtctcagcatctggctttatttctaagtgttcaggtggaatttaagccgcgatcaaatttacaatgtcactgccagctctggacacttacttttggaataaagcaaagagtgaacact

SEQ ID NO: 1632 - protein, 183 aa, Homo sapiens
MVRIWTTIMIVLILLLRIGPNKPSLSGRQAPAQAQTSDLVPSLFPLGLWAPGFCTWSSPDEDKRPRKPVPGTGNRDSGTRRRLQDATEQDPRPGNDVASAETAGPPSPSGIRAQDRAPRHRRAPPARMPVAPAPSADGEPLQEQGGGLFHRTRSVYNGLELNTWMKVERLFVEKFHQSFSLDN

SEQ ID NO: 1633 - DNA, 4205 bp, Homo sapiens
tagtctctgactcgctcgggcagaggccgaggaagccggttccggggacgggcaacagggactcagggaccagaaggcggctgcaggacgcgaccgagcaggaccccaggcccgggaacgacgtcgcgagcgctgagactgccgggcctcccagcccatctggcattcgagcgcaggaccgggcgccccggcaccgccgcgcgccacccgctaggatgccggtggccccagcgccctcagccgacggaggagccctttttcaacgccctcgctggagtctggcctgcacgccttgctgaatgaagccggaacctcagccccgcttccctttgaaatgaatgttcctggggcgccctctcgtggattttggagctaatcgtctgtgaatgccaagtgatggcaactgccctcccgccgcgtctccagccggtgcgggggaacgagaccctgcgggagcattaccagtacgtggggaagttggcgggcaggctgaaggaggcctccgagggcagcacgctcaccaccgtgctcttcttggtcatctgcagcttcatcgtcttggagaacctgatggttttgattgccatctggaaaaacaataaatttcacaaccgcatgtactttttcattggcaacctggctctctgcgacctgctggccggcatcgcttacaaggtcaacattctgatgtctggcaagaagacgttcagcctgtctcccacggtctggttcctcagggagggcagtatgttcgtggcccttggggcgtccacctgcagcttactggccatcgccatcgagcggcacttgacaatgatcaaaatgaggccttacgacgccaacaagaggcaccgcgtcttcctcctgatcgggatgtgctggctcattgccttcacgctgggcgccctgcccattctgggctggaactgcctgcacaatctccctgactgctctaccatcctgcccctctactccaagaagtacattgccttctgcatcagcatcttcacggccatcctggtgaccatcgtgatcctctacgcacgcatctacttcctggtgaagtccagcagccgtaaggtggccaaccacaacaactcggagcggtccatggcactgctgcggaccgtggtgattgtggtgagcgtgttcatcgcctgctggtccccactcttcatcctcttcctcattgatgtggcctgcagggtgcaggcgtgccccatcctcttcaaggctcagtggttcatcgtgttggctgtgctcaactccgccatgaacccggtcatctacacgctggccagcaaggagatgcggcgggccttcttccgtctggtctgcaactgcctggtcaggggacggggggcccgcgcctcacccatccagcctgcgctcgacccaagcagaagtaaatcaagcagcagcaacaatagcagccactctccgaaggtcaaggaagacctgccccacacagccccctcatcctgcatcatggacaagaacgcagcacttcagaatgggatcttctgcaactgatcgtctccatgcgccctgctctgcggctgtgttcttatttattgcatgcgtcgcttccacaggggcccctcaagagctgtgactcgggagagctaccttactttgaccaacagcctgcccagtgtggatgtctcttacagagggggcccaaggaatcaccaccccgcttcagtgtaaacaacgtgccttgtccactttgggctccagagtctttcagatgtactaagctgctgacatcatccactgccttctgctgcatcctagacaccctccctgttgttcacagagagggaaggtcgtgggccacacaatgctgtgtgaccctctccgtgtgcctctgaatggtgttttgatgattttacactacatttcctgtgcgtagaatggatgcttgtatattcgtacatctctatgttacacagaatttgtgttgcaggtgtttgccatgtggtacctacatagaatctccatacaacacacaggtaacaggttatacaagtggattcagactgaacccccagtacaaggacattgttttgaactaggtggacatgccatccctggtctccttagactgacatgattctcatgttaaccaagttttaaaagttcaaattccccaaaaaggcttgtccaaggctggccccagatgtgtgggtctgacccacaccagccctgtgtcctgtcctttcagtcatttgtccctgcgtaattttaatcgtattccaaagcccaattatgtgatggttttcaggtttctgcaaattacagaagagccagccaagatcacccaggagcttgtgcccccagatgggccaaagaaagagcctatgaaggagaagcagaagcagacggctggcctggctcaccttcccacgccagtggggcaggggtctgcttcaggaaatggaagctgtccaggaaatgagcagagattcacaagacagcactttgattctatgttgagtttgtttctatattagaaaagcagcaagtcagtaatcccccgtggcatcacagctaagtagctgtggccaccggcagtttcacagcatcctgaaagctggcactgatcgtgactatcagtgaaagaagtttaattttcaggttagaaaatgtgatctggcagtttatgcattcttcagagtaatgtaataatacctatgtgatgctgtaattttacttttcaacataagttgaacccgtagcagtctgtttaccttgtaaagggattacttagaagacatttttgtacatgctcttccccaaggattgtacgtattatacaaatagatggaaagaaaagtgaacacgtttgtagaactttcataagcacacagttgctgtgttgagttctctttaaaaacaaggacaaaaccaaccagcgttcaaaggaacctcccatcagagtcccctaaagtattttaggttcagtgagcatttgcctgaataaaacctaaaagagtagtcttaacacattactaactttttctaagagaaattgattcctgttttgtcatctgatgcaatttgctcttataaagagacattttcataggttcagagtaactcacctccatgggctgaccaaaggcttttctaatttttgttactgatgagatgaaacctatttgtaaggagatcttccccaggagcatttctgttgccttcttgacatcaatgaaaagtagcatattctcttatgaaatagcatgagaaaacacagggcatttctaggacagtaaaacgttaaagtactggattaagaaaacaacaacaggctgggcgcagtggctcacacctgtaatcccagcactttgggaggctgaggcgggtggatcacctgaggtcaggagtttgtgaccagcctggccaacatagtgaaatcctgtttctactaaaaatacaaaaattagctggatgcgatagcacgtgcctgtagtcccagctactcgggaggctgaggctggagagttgctcaaacccgggaggcggagattgcagtgagccaagatcgcaccgctgcactccagcctgggtgacagagcgaccctctgtctcaaaaaataataataataataaataaaacaacaacaaaatgcatcagagagccaaaacattcagtattgcattttcacataggtgatgaaatgactttggaactttatctgtgttatagttatgagttgctttgggagacttggagctctctgtagctattgttcataacactttgctccataaccctgatgtccgcagtatctaagtatctcagccttcatccattaactctactagggagcccacagccaccatttccactaggaggtatcaatatttgtggtatgacataaggctcccttgaaataacaagacttttgagcaatctgaattaaaaatacatcaaaaaagtaatagcgctcatttgctaaatgcaaaaaataatcacctttgataccaatgtgcaccaatatgcctaactagctagccagctggagataatttaccagggaatgtttcaaagccctaaccttgaagtttggaaacaggtggtcttctatgctgcagagaaactatgcattaggtctcttttcaattagaaacctttactatttccaatgtatgtttgttaaaaataataataataaaaccaaaagcctttgtggaaaccc

SEQ ID NO: 1634 - protein, 378 aa, Homo sapiens
MATALPPRLQPVRGNETLREHYQYVGKLAGRLKEASEGSTLTTVLFLVICSFIVLENLMVLIAIWKNNKFHNRMYFFIGNLALCDLLAGIAYKVNILMSGKKTFSLSPTVWFLREGSMFVALGASTCSLLAIAIERHLTMIKMRPYDANKRHRVFLLIGMCWLIAFTLGALPILGWNCLHNLPDCSTILPLYSKKYIAFCISIFTAILVTIVILYARIYFLVKSSSRKVANHNNSERSMALLRTVVIVVSVFIACWSPLFILFLIDVACRVQACPILFKAQWFIVLAVLNSAMNPVIYTLASKEMRRAFFRLVCNCLVRGRGARASPIQPALDPSRSKSSSSNNSSHSPKVKEDLPHTAPSSCIMDKNAALQNGIFCN

SEQ ID NO: 1635 - DNA, 3759 bp, Homo sapiens
agagtcaacctatttgatttcttgacaagaccacaatctgatcccaaagatgtgctccacaaatccaggcaaatgggtcacctttgatgatgatcctgctgttcaatcttctcaaaagtcaaagaattttcctctggagaatcaaggtgtctgtagaccaaatggactgaagctgaaccttcctggcctcagggaatttcccagtggatcttcctccaccagcagcactcctctctcctcccccattgtagatttttatttcagtccaggacctccaagtaactctcctctttctacacctaccaaagacttcccaggttttcctggcatccccaaagcagggactcatgtgctttatcctattccagaatcatcttcagacagcccactcgcaatatcaggaggagaatcttccttactgcctaccagaccaacatgtttatcccatgccttgttacccagtgaccactcatgtacacatccaactcccaaagtaggtcttccagatgaagttaatcctcaacaggctgaaagcctaggattccaaagtgatgatctcccccagtttcagtattttcgagaggactgtgctttttcaagtccattttggaaagatgaaggcagtgattcccatttcacccttgacccaccaggaagcaaaaagatgttctcatcaagaaacaaggagatgcctattgaccaaaaaagcctaaataagtgttcactcaactatatctgtgagaagcttgaacatctccagtcagctgagaaccaagactcacttagaagtttgtctatgcactgtctatgtgctgaagaaaatgcctcttcctttgtcccccacacactcttcaggagtcagccaaaatccggatggtctttcatgctgagaattcctgagaagaagaatatgatgtcttcccggcaatggggaccaatttttctgaaagttttgcctggaggaattttgcagatgtattatgaacagggattagaaaaaccatttaaagagatacagcttgatccatattgtaggctttctgaacccaaggttgagaacttcagtgtagcaggaaaaatccacactgtgaagattgaacatgtgtcttacacagaaaaaaggaaataccattctaagacagaagtagttcatgaacctgacatagagcagatgctgaagttggggtccacatcgtaccatgacttccttgactttctgactactgtggaggaggagctgatgaagttgccagctgtttcaaaaccaaaaaagaactacgaggagcaagaaatttccttggaaattgtggacaacttttggggtaaagtcacaaaagaaggaaaatttgttgaaagtgctgtgataactcaaatttattgcctctgctttgtgaatgggaacctggaatgctttttaaccttgaatgaccttgagttgccgaagcgagatgaatcctattatgagaaggactcagaaaaaaaggggattgatattcttgactaccattttcataagtgtgtgaatgtacaagaatttgagcaatcaagaatcattaagtttgtacctctggatgcctgccggtttgagctgatgcgtttcaagactttgtataatggggataatcttcccttttccttgaagtctgtagtggttgtccagggagcatacgtggaacttcaggcttttgtcaacatggcctcattggcgcagaggtcatcctatgctggttccttaaggtcctgtgacaatataaggatacactttcctgtcccatcgcagtggatcaaggccctttggaccatgaacctccagaggcagaagtctctgaaagctaaaatgaaccgccgagcatgtctggggagtttacaggaacttgaatctgaacctgtcattcaagtcactgtggggtcagcaaaatatgagagtgcctaccaggcagtggtatggaagatagatcggcttccagacaaaaattcaagtctagatcatccccattgtctgtcatacaaattagagcttggatcagaccaagaaattccctctgattggtatccatttgctactgttcagttttccgtgcctgacacctgtgcctcaaggacagaggtcaggtctctgggagtggagagtgatgtccagccacagaaacatgttcagcagcgagcttgctacaacatccagcctaaactctacagatctgtaattgaagatgtaattgaaggagttcggaatctatttgctgaagaaggtatagaggaacaagttttaaaagacttgaagcagctctgggaaaccaaggttttgcagtctaaagcaacagaagacttcttcagaaatagcatccaatcacctctgtttactcttcagttgccgcacagcttgcaccaaacattgcaatcgtcaacagcatcattagttattcctgctggtagaactcttccaagttttaccacagcagaactgggcacttcaaactccagtgcaaactttacttttcctggttatcccattcatgtaccagcaggtgtgacactacagactgtatctggtcacctttataaagtcaatgtaccaattatggtgacagagacttctggaagagcaggtattcttcagcatccaattcagcaagtatttcaacagcttggccagccttcagtaatacaaactagtgttccacaattgaatccatggtctcttcaagcaactactgaaaaatcacagagaattgaaaccgtgctacagcaacccgcaattctaccttctgggccagtagataggaaacacttagaaaatgccaccagtgatatacttgtatctcctggaaatgagcataaaatcgtgcctgaagctttgttgtgtcatcaggaaagttctcactatatcagtcttccaggtgttgtattttctccacaggtctctcaaacaaattctaatgtggagtcagtgctcagtggttcagctagcatggctcaaaatctgcatgatgagtccctctccacaagccctcatggggctctccaccagcacgtgactgatattcagcttcatattcttaaaaataggatgtatggatgtgattctgtaaagcaaccaagaaatatagaggaacccagcaacatacctgtatcagagaaggattctaattctcaggtggatttaagcattcgggttactgatgatgatattggtgaaataattcaagtagatggaagcggtgatacatcttccaatgaagaaataggaagtacaagagatgcagatgagaatgaatttctagggaatattgacgggggagatctgaaggtacctgaagaagaagctgacagtatttcaaatgaggattcagccacaaacagtagtgataatgaagaccctcaagtaaacattgtagaagaggaccctttaaattctggagatgatgttagtgaacaggatgtgccagacctgtttgacacggataatgttattgtctgtcagtatgataagattcatcgaagcaagaacaaatggaaattctatttgaaagatggtgttatgtgttttggagggagagactatgtatttgcaaaagccattggtgatgcagagtggtaaaccttgtgagctcagtacatctattttgtgaacatcagttggattatattgcatattgtgaattcatttttattttgaatatagtccagcacagagctgttcaaatttttagttcactgtatggaatttaataaaattataattcagatgcagatacaatt

SEQ ID NO: 1636 - protein, 1182 aa, Homo sapiens
MCSTNPGKWVTFDDDPAVQSSQKSKNFPLENQGVCRPNGLKLNLPGLREFPSGSSSTSSTPLSSPIVDFYFSPGPPSNSPLSTPTKDFPGFPGIPKAGTHVLYPIPESSSDSPLAISGGESSLLPTRPTCLSHALLPSDHSCTHPTPKVGLPDEVNPQQAESLGFQSDDLPQFQYFREDCAFSSPFWKDEGSDSHFTLDPPGSKKMFSSRNKEMPIDQKSLNKCSLNYICEKLEHLQSAENQDSLRSLSMHCLCAEENASSFVPHTLFRSQPKSGWSFMLRIPEKKNMMSSRQWGPIFLKVLPGGILQMYYEQGLEKPFKEIQLDPYCRLSEPKVENFSVAGKIHTVKIEHVSYTEKRKYHSKTEVVHEPDIEQMLKLGSTSYHDFLDFLTTVEEELMKLPAVSKPKKNYEEQEISLEIVDNFWGKVTKEGKFVESAVITQIYCLCFVNGNLECFLTLNDLELPKRDESYYEKDSEKKGIDILDYHFHKCVNVQEFEQSRIIKFVPLDACRFELMRFKTLYNGDNLPFSLKSVVVVQGAYVELQAFVNMASLAQRSSYAGSLRSCDNIRIHFPVPSQWIKALWTMNLQRQKSLKAKMNRRACLGSLQELESEPVIQVTVGSAKYESAYQAVVWKIDRLPDKNSSLDHPHCLSYKLELGSDQEIPSDWYPFATVQFSVPDTCASRTEVRSLGVESDVQPQKHVQQRACYNIQPKLYRSVIEDVIEGVRNLFAEEGIEEQVLKDLKQLWETKVLQSKATEDFFRNSIQSPLFTLQLPHSLHQTLQSSTASLVIPAGRTLPSFTTAELGTSNSSANFTFPGYPIHVPAGVTLQTVSGHLYKVNVPIMVTETSGRAGILQHPIQQVFQQLGQPSVIQTSVPQLNPWSLQATTEKSQRIETVLQQPAILPSGPVDRKHLENATSDILVSPGNEHKIVPEALLCHQESSHYISLPGVVFSPQVSQTNSNVESVLSGSASMAQNLHDESLSTSPHGALHQHVTDIQLHILKNRMYGCDSVKQPRNIEEPSNIPVSEKDSNSQVDLSIRVTDDDIGEIIQVDGSGDTSSNEEIGSTRDADENEFLGNIDGGDLKVPEEEADSISNEDSATNSSDNEDPQVNIVEEDPLNSGDDVSEQDVPDLFDTDNVIVCQYDKIHRSKNKWKFYLKDGVMCFGGRDYVFAKAIGDAEW

SEQ ID NO: 1637 - DNA, 5810 bp, Homo sapiens
gatcccaaagatgtgctccacaaatccaggcaaatgggtcacctttgatgatgatcctgctgttcaatcttctcaaaagtcaaagaattttcctctggagaatcaaggtgtctgtagaccaaatggactgaagctgaaccttcctggcctcagggaatttcccagtggatcttcctccaccagcagcactcctctctcctcccccattgtagatttttatttcagtccaggacctccaagtaactctcctctttctacacctaccaaagacttcccaggttttcctggcatccccaaagcagggactcatgtgctttatcctattccagaatcatcttcagacagcccactcgcaatatcaggaggagaatcttccttactgcctaccagaccaacatgtttatcccatgccttgttacccagtgaccactcatgtacacatccaactcccaaagtaggtcttccagatgaagttaatcctcaacaggctgaaagcctaggattccaaagtgatgatctcccccagtttcagtattttcgagaggactgtgctttttcaagtccattttggaaagatgaaggcagtgattcccatttcacccttgacccaccaggaagcaaaaagatgttctcatcaagaaacaaggagatgcctattgaccaaaaaagcctaaataagtgttcactcaactatatctgtgagaagcttgaacatctccagtcagctgagaaccaagactcacttagaagtttgtctatgcactgtctatgtgctgaagaaaatgcctcttcctttgtcccccacacactcttcaggagtcagccaaaatccggatggtctttcatgctgagaattcctgagaagaagaatatgatgtcttcccggcaatggggaccaatttttctgaaagttttgcctggaggaattttgcagatgtattatgaacagggattagaaaaaccatttaaagagatacagcttgatccatattgtaggctttctgaacccaaggttgagaacttcagtgtagcaggaaaaatccacactgtgaagattgaacatgtgtcttacacagaaaaaaggaaataccattctaagacagaagtagttcatgaacctgacatagagcagatgctgaagttggggtccacatcgtaccatgacttccttgactttctgactactgtggaggaggagctgatgaagttgccagctgtttcaaaaccaaaaaagaactacgaggagcaagaaatttccttggaaattgtggacaacttttggggtaaagtcacaaaagaaggaaaatttgttgaaagtgctgtgataactcaaatttattgcctctgctttgtgaatgggaacctggaatgctttttaaccttgaatgaccttgagttgccgaagcgagatgaatcctattatgagaaggactcagaaaaaaaggggattgatattcttgactaccattttcataagtgtgtgaatgtacaagaatttgagcaatcaagaatcattaagtttgtacctctggatgcctgccggtttgagctgatgcgtttcaagactttgtataatggggataatcttcccttttccttgaagtctgtagtggttgtccagggagcatacgtggaacttcaggcttttgtcaacatggcctcattggcgcagaggtcatcctatgctggttccttaaggtcctgtgacaatataaggatacactttcctgtcccatcgcagtggatcaaggccctttggaccatgaacctccagaggcagaagtctctgaaagctaaaatgaaccgccgagcatgtctggggagtttacaggaacttgaatctgaacctgtcattcaagtcactgtggggtcagcaaaatatgagagtgcctaccaggcagtggtatggaagatagatcggcttccagacaaaaattcaagtctagatcatccccattgtctgtcatacaaattagagcttggatcagaccaagaaattccctctgattggtatccatttgctactgttcagttttccgtgcctgacacctgtgcctcaaggacagaggtcaggtctctgggagtggagagtgatgtccagccacagaaacatgttcagcagcgagcttgctacaacatccaggttgaaatagaaaagaagtggattaaaatcgatggagaagacccagataaaattggtgactgcataactcagtaggagtagcaagagtttatgatgacagcccacttgtcaaatatgtaattcaccgaaaccacaccaagtcctgctactgtagagtggaaatgacttctgaatagcggttttaggacaggtctgatggctgtgtttagagaagtttagacctaaaaccgaacaatctgtattttttgcttttcatgtgtttttgtcctaggggttcgatctaaaatgtttctataattcgtgtgatgttttgcttcctattgaaactcaaaggcactgttactcgttgtgtgaccccgcagccagtatgatttttgattactcagtggctgactgttttgctctctggattactgaggtgccgtcttcatttcttcccatctcttcttgctgcttagtgtctgtactagagggtaagggaatcaaaggagacataaaccaaaatagttaattttccctctttcttgcctctgaaatgtggctaggtgtagaatgatgttgaaaccacaggctaaaatgtagatctggaagtatctgtgcttttgaattacttatttacctgtcctcttaccgttggtaaataataattggctatatttggtacctgtctctctcctactgtattgtcattttcaaaatgtgtttgttttctggcgcgtgctgcaaagaagctatttctgttgtcctacatattttagtataaatcactaagacatatttcctttcacttggcaggattcctttcaaaatggaatctgagtattagacactagttaacatatttgtgtatattaaatatgaatttttaaaatttataaatactattttccaaaagtacagactctaaggacatattttgataaagtattatttgtaatgaacacaagcctctcttgagtagaagtctaaatcacattatgattattttatactagttctgctatcatgctgttttatgctaattctgcttattttagagtatttttcattaaaaggtgagcaaagtgaaagatacttggtattttacccagatttctaagtggcaacatttttattcttcagagtcaggtaaatgactataatagtttggtttctaatgaaaagtcaatagcattagcagttataattctgtttataatttcctttcagcatttacagtgaaaagtgagaattttaaaatttatgaaatctatattccaggtattgtttttagtctgaaaaacaaactcccccatgtggtattaatataccttcaatttatgttgagtcttaaacataattaggagatatttttctctatttgctagatttgttttgagtcaaaactgatttagtgttcttccaaacaacatttatgtgttggcctacagagtttatttcatgtgttttttttaatatttaatattatattacattcattgaaatctgttcaaaaacagattaagacaaacatttatgatggtctgtatcaatcagcagattttattgcttttcattattttactgtaaaggcaaagaatgcaataggtgatggttggttgaaaggaattgttattgctgtttttattttttactttttttgagacagagtctcactctgttgcccagcctggagtgcagtgtgtcatcttggctcactgcaacctccgcctcctgggttcaagggattctcctgcctcagcctccaactagctgggattacaggcacaagccaccatgcctggctaaaattcttttgtatttttactacagacggagtttccccatgttggccgggctagtctcgaactcctgacctcaggtgatccaccagcctcggcctcccaaagttctgggattaaatgcgtgagccaccatgcccggccgctattgctctttttaacttcatttgatgccttgcttataatatcatatgcttgaggctcactgttgatgtagagtagggcaaatctgtgtgtgtatgtcattaaaaaaattctaccatctttctttatcatctggtgtgggcgcactctacagtgacttcagtctgctcagaacgaatgtggaggccggccgaaactgatgctgcccacagtcccagtgaagttaggtgggttaattactgccattcctttctaagtgtgttttatggcatcctgcccacaaagaactcacagtctgattaggatgaacttaatgactatttacacctcaaaatatattcagcaaagggttcacttagttgcccctcatgcttcacaggttgactagtatctgtgggtacctccctgcccaggttattcactcacaagccaccgggccttcaggacatctcaagattcagtcttgacaatataatagcaaaagctggactaaagcccaaatggattgtctgtggcaatgcagaagctgatagcattaacagcagggtgttacagcataattgttaattcgcacatctattaggatccttaaatattcattacttaatgttaaattaacattctgtgtagggaggggaggcttattcaattcttctgacctcagaactggcagaaggtcagatgtgactacagaactctaggtgaaaaatcaggtagggttcaaattaagtagaactgcccttgccggaatagtgatcttcaaaaaacccttgcttttaggggagggaagcggggaaggaaaggaatgagggaggaaatattcctttctagcattcattttgcttagatcactccattgtgagtttgaccattttggagtcaaatgagcagacttccaaggagttgaccagtttgtgactagtctggtcacctttccagttacaggatcatattaactgtgtaaatgaattcatgggtagatgatttgtgcagatctgaatttaagaacatttcctttttctgtgggaatcacaagagtttatccactaaaaaaagatatgtaaaaaagatactttccagcacataaataaaggctggaattttacaacctgatgtatatattagacagttctaggatgttagttcccttcattccagagctatgcttgtgatacagccccttttcttataaagtcagttagaaggacttccttaacaatgactattataatgtcttacttaaaatacagttttgtattctgtcaatgcaaatataagacaggttgagccttaatcatgtaacaaaatattttgtagattacatattgatttttcaaaaattaaaaatgtatttcaaactattcttactgtgctgtgaatttatatcttcttctgcaagacctggggctatttttttttcttaaggtatgaaatcaatttcaataaccttaaacaattgaccctctgtcaggcatatgtcaggctccactcttaaggagtcagtgaccatgacctctttgcatatcctggaaaaatgacatcatcaaagtatagttgataatgttataaaggatgattttaaaaatagggtataatcatgactcacaaagatatgaggctgggtgtggtggctcacgcctgtaatcccagctctttgggaggctgaagcgggtggatcatgaggtcagaagatcaagaccatactggctaacacggtgaaaccccgtctctactaaaaatac

SEQ ID NO: 1638 - protein, 735 aa, Homo sapiens
MCSTNPGKWVTFDDDPAVQSSQKSKNFPLENQGVCRPNGLKLNLPGLREFPSGSSSTSSTPLSSPIVDFYFSPGPPSNSPLSTPTKDFPGFPGIPKAGTHVLYPIPESSSDSPLAISGGESSLLPTRPTCLSHALLPSDHSCTHPTPKVGLPDEVNPQQAESLGFQSDDLPQFQYFREDCAFSSPFWKDEGSDSHFTLDPPGSKKMFSSRNKEMPIDQKSLNKCSLNYICEKLEHLQSAENQDSLRSLSMHCLCAEENASSFVPHTLFRSQPKSGWSFMLRIPEKKNMMSSRQWGPIFLKVLPGGILQMYYEQGLEKPFKEIQLDPYCRLSEPKVENFSVAGKIHTVKIEHVSYTEKRKYHSKTEVVHEPDIEQMLKLGSTSYHDFLDFLTTVEEELMKLPAVSKPKKNYEEQEISLEIVDNFWGKVTKEGKFVESAVITQIYCLCFVNGNLECFLTLNDLELPKRDESYYEKDSEKKGIDILDYHFHKCVNVQEFEQSRIIKFVPLDACRFELMRFKTLYNGDNLPFSLKSVVVVQGAYVELQAFVNMASLAQRSSYAGSLRSCDNIRIHFPVPSQWIKALWTMNLQRQKSLKAKMNRRACLGSLQELESEPVIQVTVGSAKYESAYQAVVWKIDRLPDKNSSLDHPHCLSYKLELGSDQEIPSDWYPFATVQFSVPDTCASRTEVRSLGVESDVQPQKHVQQRACYNIQVEIEKKWIKIDGEDPDKIGDCITQ

SEQ ID NO: 1639 - DNA, 1668 bp, Homo sapiens
agtgtttccctccgagggcactgcgtgccgcgcaggcgcaaagggccaggtgctggaggtgctgtcatggcctgcctcaacccggtgcctaaactctacagatctgtaattgaagatgtaattgaaggagttcggaatctatttgctgaagaaggtatagaggaacaagttttaaaagacttgaagcagctctgggaaaccaaggttttgcagtctaaagcaacagaagacttcttcagaaatagcatccaatcacctctgtttactcttcagttgccgcacagcttgcaccaaacattgcaatcgtcaacagcatcattagttattcctgctggtagaactcttccaagttttaccacagcagaactgggcacttcaaactccagtgcaaactttacttttcctggttatcccattcatgtaccagcaggtgtgacactacagactgtatctggtcacctttataaagtcaatgtaccaattatggtgacagagacttctggaagagcaggtattcttcagcatccaattcagcaagtatttcaacagcttggccagccttcagtaatacaaactagtgttccacaattgaatccatggtctcttcaagcaactactgaaaaatcacagagaattgaaaccgtgctacagcaacccgcaattctaccttctgggccagtagataggaaacacttagaaaatgccaccagtgatatacttgtatctcctggaaatgagcataaaatcgtgcctgaagctttgttgtgtcatcaggaaagttctcactatatcagtcttccaggtgttgtattttctccacaggtctctcaaacaaattctaatgtggagtcagtgctcagtggttcagctagcatggctcaaaatctgcatgatgagtccctctccacaagccctcatggggctctccaccagcacgtgactgatattcagcttcatattcttaaaaataggatgtatggatgtgattctgtaaagcaaccaagaaatatagaggaacccagcaacatacctgtatcagagaaggattctaattctcaggtggatttaagcattcgggttactgatgatgatattggtgaaataattcaagtagatggaagcggtgatacatcttccaatgaagaaataggaagtacaagagatgcagatgagaatgaatttctagggaatattgacgggggagatctgaaggtacctgaagaagaagctgacagtatttcaaatgaggattcagccacaaacagtagtgataatgaagaccctcaagtaaacattgtagaagaggaccctttaaattctggagatgatgttagtgaacaggatgtgccagacctgtttgacacggataatgttattgtctgtcagtatgataagattcatcgaagcaagaacaaatggaaattctatttgaaagatggtgttatgtgttttggagggagagactatgtatttgcaaaagccattggtgatgcagagtggtaaaccttgtgagctcagtacatctattttgtgaacatcagttggattatattgcatattgtgaattcatttttattttgaatatagtccagcacagagctgttcaaatttttagttcactgtatggaatttaataaaattataattcagatgcagatacaattacac

SEQ ID NO: 1640 - protein, 478 aa, Homo sapiens
MACLNPVPKLYRSVIEDVIEGVRNLFAEEGIEEQVLKDLKQLWETKVLQSKATEDFFRNSIQSPLFTLQLPHSLHQTLQSSTASLVIPAGRTLPSFTTAELGTSNSSANFTFPGYPIHVPAGVTLQTVSGHLYKVNVPIMVTETSGRAGILQHPIQQVFQQLGQPSVIQTSVPQLNPWSLQATTEKSQRIETVLQQPAILPSGPVDRKHLENATSDILVSPGNEHKIVPEALLCHQESSHYISLPGVVFSPQVSQTNSNVESVLSGSASMAQNLHDESLSTSPHGALHQHVTDIQLHILKNRMYGCDSVKQPRNIEEPSNIPVSEKDSNSQVDLSIRVTDDDIGEIIQVDGSGDTSSNEEIGSTRDADENEFLGNIDGGDLKVPEEEADSISNEDSATNSSDNEDPQVNIVEEDPLNSGDDVSEQDVPDLFDTDNVIVCQYDKIHRSKNKWKFYLKDGVMCFGGRDYVFAKAIGDAEW

SEQ ID NO: 1641 - DNA, 1648 bp, Homo sapiens
agtgtttccctccgagggcactgcgtgccgcgcaggcgcaaagggccaggtgctggaggtgctgtcatggcctgcctcaacccggtgcctaaactctacagatctgtaattgaagatgtaattgaaggagttcggaatctatttgctgaagaaggtatagaggaacaagttttaaaagacttgaagcagctctgggaaaccaaggttttgcagtctaaagcaacagaagacttcttcagaaatagcatccaatcacctctgtttactcttcagttgccgcacagcttgcaccaaacattgcaatcgtcaacagcatcattagttattcctgctggtagaactcttccaagttttaccacagcagaactgggcacttcaaactccagtgcaaactttacttttcctggttatcccattcatgtaccagcaggtgtgacactacagactgtatctggtcacctttataaagtcaatgtaccaattatggtgacagagacttctggaagagcaggtattcttcagcatccaattcagcaagtatttcaacagcttggccagccttcagtaatacaaactagtgttccacaattgaatccatggtctcttcaagcaactactgaaaaatcacagagaattgaaaccgtgctacagcaacccgcaattctaccttctgggccagtagataggaaacacttagaaaatgccaccagtgatatacttgtatctcctggaaatgagcataaaatcgtgcctgaagctttgttgtgtcatcaggaaagttctcactatatcagtcttccaggtgttgtattttctccacaggtctctcaaacaaattctaatgtggagtcagtgctcagtggttcagctagcatggctcaaaatctgcatgatgagtccctctccacaagccctcatggggctctccaccagcacgtgactgatattcagcttcatattcttaaaaataggatgtatggatgtgattctgtaaagcaaccaagaaatatagaggaacccagcaacatacctgtatcagagaaggattctaattctcaggtggatttaagcattcgggttactgatgatgatattggtgaaataattcaagtagatggaagcggtgatacatcttccaatgaagaaataggaagtacaagagatgcagatgagaatgaatttctagggaatattgacgggggagatctgaaggtacctgaagaagaagctgacagtatttcaaatgaggattcagccacaaacagtagtgataatgaagaccctcaagtaaacattgtagaagaggaccctttaaattctggagatgatgttagtgaacaggatgtgccagacctgtttgacacggataatgttattgtctgtcagtatgataaggcattcccaagaaggacatcgtttaacacctaaactcatttaacaaaggatccgagaagaacagggacagtgtgggaagaaatcttcttgtgatggcatatttgcttcctatatttcttctggaatcatgttcgcttggcttcctgattaaaaacacagttttattgctctctgcactgccaaaccaataaatttacagaagagaaagctgtattccactgtaccccttgcagcatcaataaaactgacagcc

SEQ ID NO: 1642 - protein, 453 aa, Homo sapiens
MACLNPVPKLYRSVIEDVIEGVRNLFAEEGIEEQVLKDLKQLWETKVLQSKATEDFFRNSIQSPLFTLQLPHSLHQTLQSSTASLVIPAGRTLPSFTTAELGTSNSSANFTFPGYPIHVPAGVTLQTVSGHLYKVNVPIMVTETSGRAGILQHPIQQVFQQLGQPSVIQTSVPQLNPWSLQATTEKSQRIETVLQQPAILPSGPVDRKHLENATSDILVSPGNEHKIVPEALLCHQESSHYISLPGVVFSPQVSQTNSNVESVLSGSASMAQNLHDESLSTSPHGALHQHVTDIQLHILKNRMYGCDSVKQPRNIEEPSNIPVSEKDSNSQVDLSIRVTDDDIGEIIQVDGSGDTSSNEEIGSTRDADENEFLGNIDGGDLKVPEEEADSISNEDSATNSSDNEDPQVNIVEEDPLNSGDDVSEQDVPDLFDTDNVIVCQYDKAFPRRTSFNT

SEQ ID NO: 1643 - DNA, 4746 bp, Homo sapiens
gctcctgccgctgcggtccgtcggtcggtcagtcagtcccttcgcgctcctgagccgccggcgcgccgggcgccccggaaaagagtgcctgagagtgccagaggcttggtggaagggcagacgagagaagaggaggcattgtattggccactgggacaactgcagactcactcttacctgtaaagaagcagttaatgttggggaatgtagtcaggattggaaaaccacggggatttctgcacattataattgagaatgtaaatattcttaaagtggcaccctgaaagagacaagcattgaaaccagacaaaataaattggatcatgaacagaatgagacatcttaaaggagatagcatgtggaggcctgctgggaagtagaggcaaattccagatgcctaggagccttagtctaaggtggggccatccaacccacagaaataaatatgggcagtggcccaagacttcctataatgagctgcacctgttgtaagtcttgtgttcttgcctatagaataaagaacctcactaccatcctgcaagtgcaaattgaaagattcctgttgtgatgccatgagttattatccgctggttatattctattggaatggctacactcaactggatattgctgtctatattgttggagcacctcaaacaggggtgcaatggttatttgttaatttacttaattaagacatgttcatccacattttatagtttcatttatttaaagatccatttggtccccagcttcgatgcatgtttctctgcttcatctccccatatttccatgttcctgctgatgtttataccatatcctggcacccagcatcatctgtgtgttgttcaccaaggccgtgggaacagagtctgtaaatcaatagttcatcacggagtacagatttcatgaaaagaaattggattggaagaaagtctcctagtgaacacgctagtatccaaagagtctggattgtatcagaatccatcacagtaggagagaatgttgttttgagtaatttccaagcagagtacatatattttcctctgaaaatctttgtaaattgaagaaaagtgacatttttataccaagcaatttgtttgataacctattttcagatttctacaaataataaaatttctgattttaaatattttttacaaatacaagttggttttcttttcattgtaagccttactgtgatttcagaagaatttttaacatttgctaaatggataatctcatttaaacatggaagtaacatcctaatcctttcttggatggactctgtatctattgtaattaagactttaaaaatggtatatacatatgggaaaaaaaggagaggaaacaggaaaattaaatcaagtgatgggtttgaggaatttataagtatttgaccgtactcaaaatgtgcaaggaagaataatggaagcccctgaataccttgatttggatgaaattgactttagtgatgacatatcttattcagtcacatcactcaagacgatcccagaactgtgccgaagatgtgatacgcaaaacgaagacagatcagtttctagctctagctggaattgtggcatctcaactcttattacaaacacgcaaaagcccacaggaatcgctgatgtgtacagtaagttccgcccagtgaagcgggtttcgccactgaaacatcagccagagactctggagaacaatgaaagtgatgaccaaaagaaccagaaagtggttgagtaccagaaagggggtgagtctgacctgggcccccagcctcaggagcttggccctggagatggagtgggcggcccaccaggtaagagctctgagcccagcacatcgctgggtgaactggagcactacgacctcgacatggatgagattctggatgtgccttatattaaatccagtcagcagcttgcctcttttaccaaggtgacttcagaaaaaagaattttgggcttatgcacaaccatcaatggcctttctggcaaagcctgctctacaggaagttctgagagctcatcatccaacatggcaccattttgtgttctttctcccgtgaaaagccctcacttgagaaaagcatcagctgtcatccacgaccagcacaagctgtccactgaagaaaccgagatctcacctcctctggttaaatgtggctctgcatatgagcctgaaaaccagagtaaagacttcctaaacaagacatttagtgatcctcatggtcgaaaagttgagaagacaacaccagactgccagctcagggccttccacctacaatcctcagcagcagaatccaaaccagaagagcaggtcagtggcctaaaccggaccagctcccaaggcccagaagaaaggagtgagtatctgaaaaaagtgaaaagcatcttgaacattgttaaagaaggacagatctctctcctgccacacctagctgcagacaatctagacaaaattcacgacgaaaatggaaacaatctattacatattgcggcgtcacagggacacgcagagtgtctacagcacctcacttctttgatgggagaagactgcctcaatgagcgcaacactgagaagttgactccagcaggcctggccattaagaatggtcagttggagtgcgtacgctggatggtgagcgaaacagaagccattgcagaactgagttgttctaaggattttccaagccttattcattacgcaggttgctatggccaggaaaagattcttctgtggcttcttcagtttatgcaagaacagggcatctcgttggatgaagtagaccaggatggcaacagtgccgttcacgtagcctcacagcatggctaccttggatgcatacagaccttggttgaatatggagcaaatgtcaccatgcagaaccacgctggggaaaagccctcccagagcgccgagcggcaggggcacaccctgtgctccaggtacctggtggtggtggagacctgcatgtcgctggcctctcaagtggtgaagttaaccaagcagctaaaggaacaaacagtagaacgtgtcacgctgcagaaccaactccaacaatttctagaagcccagaaatcagagggcaagtcactcccttcttcacccagttcaccatcctcacctgcctccagaaagtcccagtggaaatctccagatgcagatgatgattctgtagccaaaagcaagccaggagtccaagaggggattcaggttcttggaagcctgtcagcctccagccgggctagacccaaagcaaaagatgaagattctgataaaatcttacgccagttattgggaaaggaaatctcagaaaatgtctgcacccaggaaaaactgtccttggaattccaggatgctcaggcttcctctagaaattctaaaaagatcccactggagaagagggaactgaagttagccaggctgagacagctgatgcagaggtcactgagtgagtctgacacagactccaacaactctgaggaccccaagactaccccagtgaggaaggctgaccgaccaaggccgcagcccattgtagaaagcgtagagagtatggacagcgcagaaagcctgcacctgatgattaagaaacacaccttggcatcagggggacgcaggtttcctttcagcatcaaggcctccaaatccctggatggccacagcccatctcccacctcagagagcagcgaaccagacttagaatcccagtatccaggctcagggagtattcctccaaaccagccctctggtgaccctcagcagcccagccctgacagtactgctgcccagaaagttgccacaagtcccaagagtgccctcaagtctccatcttccaagcgtaggacatctcagaacttaaaactgagagttacctttgaggagcctgtggtgcagatggagcagcctagccttgaactgaatggagaaaaagacaaagataagggcaggactctccagcggacctccacaagtaacgaatcgggggatcaactgaaaaggccttttggagcctttcgatctatcatggagacactaagtggcaaccaaaacaataataataactaccaggcagccaaccagctgaaaacctctacattgcccttgacctcacttgggaggaagacagatgccaagggaaaccctgccagctccgctagcaaaggaaagaataaggcagcataatgacatcaatagaaaaatgaagaaatcctacagcataaagcacattgctgagccagagtcaaaagaactcttcttgtaaatcactttttaaattttctctcactgatgccctttggaaattattggaaatttctggactatcctctttggaaagagaaccatgaaaacaatgcctcaccagcagaagaacagaatatcaggatgccttaaatttatagtagtagactgtaaaagattcattttggggtgatatctgtatatataacttgtttttttaaaagatgccgtttaaaagcatgattgggaaaatgtatgttttttaagagtagattgattcaccctacccacaggacattcaccaagccactgataccattttatatttcatcaattgcatgagtatttgctaatgttgattgaacctccctttccccataatgtgggcagatttggctcagctccttcatgagatcaggtcagtggtattgtttctgtcaagagtgttttttctgtcatttctactttttgtataaaggaaataaaacaatgttaacagcc

SEQ ID NO: 1644 - protein, 919 aa, Homo sapiens
MEAPEYLDLDEIDFSDDISYSVTSLKTIPELCRRCDTQNEDRSVSSSSWNCGISTLITNTQKPTGIADVYSKFRPVKRVSPLKHQPETLENNESDDQKNQKVVEYQKGGESDLGPQPQELGPGDGVGGPPGKSSEPSTSLGELEHYDLDMDEILDVPYIKSSQQLASFTKVTSEKRILGLCTTINGLSGKACSTGSSESSSSNMAPFCVLSPVKSPHLRKASAVIHDQHKLSTEETEISPPLVKCGSAYEPENQSKDFLNKTFSDPHGRKVEKTTPDCQLRAFHLQSSAAESKPEEQVSGLNRTSSQGPEERSEYLKKVKSILNIVKEGQISLLPHLAADNLDKIHDENGNNLLHIAASQGHAECLQHLTSLMGEDCLNERNTEKLTPAGLAIKNGQLECVRWMVSETEAIAELSCSKDFPSLIHYAGCYGQEKILLWLLQFMQEQGISLDEVDQDGNSAVHVASQHGYLGCIQTLVEYGANVTMQNHAGEKPSQSAERQGHTLCSRYLVVVETCMSLASQVVKLTKQLKEQTVERVTLQNQLQQFLEAQKSEGKSLPSSPSSPSSPASRKSQWKSPDADDDSVAKSKPGVQEGIQVLGSLSASSRARPKAKDEDSDKILRQLLGKEISENVCTQEKLSLEFQDAQASSRNSKKIPLEKRELKLARLRQLMQRSLSESDTDSNNSEDPKTTPVRKADRPRPQPIVESVESMDSAESLHLMIKKHTLASGGRRFPFSIKASKSLDGHSPSPTSESSEPDLESQYPGSGSIPPNQPSGDPQQPSPDSTAAQKVATSPKSALKSPSSKRRTSQNLKLRVTFEEPVVQMEQPSLELNGEKDKDKGRTLQRTSTSNESGDQLKRPFGAFRSIMETLSGNQNNNNNYQAANQLKTSTLPLTSLGRKTDAKGNPASSASKGKNKAA

SEQ ID NO: 1645 - DNA, 4958 bp, Homo sapiens
gctcctgccgctgcggtccgtcggtcggtcagtcagtcccttcgcgctcctgagccgccggcgcgccgggcgccccggaaaagagtgcctgagagtgccagaggcttggtggaagggcagacgagagaagaggaggcattgtattggccactgggacaactgcagactcactcttacctgtaaagaagcagttaatgttggggaatgtagtcaggattggaaaaccacggggatttctgcacattataattgagaatgtaaatattcttaaagtggcaccctgaaagagacaagcattgaaaccagacaaaataaattggatcatgaacagaatgagacatcttaaaggagatagcatgtggaggcctgctgggaagtagaggcaaattccagatgcctaggagccttagtctaaggtggggccatccaacccacagaaataaatatgggcagtggcccaagacttcctataatgagctgcacctgttgtaagtcttgtgttcttgcctatagaataaagaacctcactaccatcctgcaagtgcaaattgaaagattcctgttgtgatgccatgagttattatccgctggttatattctattggaatggctacactcaactggatattgctgtctatattgttggagcacctcaaacaggggtgcaatggttatttgttaatttacttaattaagacatgttcatccacattttatagtttcatttatttaaagatccatttggtccccagcttcgatgcatgtttctctgcttcatctccccatatttccatgttcctgctgatgtttataccatatcctggcacccagcatcatctgtgtgttgttcaccaaggccgtgggaacagagtctgtaaatcaatagttcatcacggagtacagatttcatgaaaagaaattggattggaagaaagtctcctagtgaacacgctagtatccaaagagtctggattgtatcagaatccatcacagtaggagagaatgttgttttgagtaatttccaagcagagtacatatattttcctctgaaaatctttgtaaattgaagaaaagtgacatttttataccaagcaatttgtttgataacctattttcagatttctacaaataataaaatttctgattttaaatattttttacaaatacaagttggttttcttttcattgtaagccttactgtgatttcagaagaatttttaacatttgctaaatggataatctcatttaaacatggaagtaacatcctaatcctttcttggatggactctgtatctattgtaattaagactttaaaaatggtatatacatatgggaaaaaaaggagaggaaacaggaaaattaaatcaagtgatgggtttgaggaatttataagtatttgaccgtactcaaaatgtgcaaggaagaataatggaagcccctgaataccttgatttggatgaaattgactttagtgatgacatatctgacaataggagtcaagggaacaggctacaaaagcttggattggaggacacagacagggaagatgcaatgggctttggttcccatagggccaaactgacagtagttgctgccctgggagcttgccattgtcctgagaatgagtattcagtcacatcactcaagacgatcccagaactgtgccgaagatgtgatacgcaaaacgaagacagatcagtttctagctctagctggaattgtggcatctcaactcttattacaaacacgcaaaagcccacaggaatcgctgatgtgtacagtaagttccgcccagtgaagcgggtttcgccactgaaacatcagccagagactctggagaacaatgaaagtgatgaccaaaagaaccagaaagtggttgagtaccagaaagggggtgagtctgacctgggcccccagcctcaggagcttggccctggagatggagtgggcggcccaccaggtaagagctctgagcccagcacatcgctgggtgaactggagcactacgacctcgacatggatgagattctggatgtgccttatattaaatccagtcagcagcttgcctcttttaccaaggtgacttcagaaaaaagaattttgggcttatgcacaaccatcaatggcctttctggcaaagcctgctctacaggaagttctgagagctcatcatccaacatggcaccattttgtgttctttctcccgtgaaaagccctcacttgagaaaagcatcagctgtcatccacgaccagcacaagctgtccactgaagaaaccgagatctcacctcctctggttaaatgtggctctgcatatgagcctgaaaaccagagtaaagacttcctaaacaagacatttagtgatcctcatggtcgaaaagttgagaagacaacaccagactgccagctcagggccttccacctacaatcctcagcagcagaatccaaaccagaagagcaggtcagtggcctaaaccggaccagctcccaaggcccagaagaaaggagtgagtatctgaaaaaagtgaaaagcatcttgaacattgttaaagaaggacagatctctctcctgccacacctagctgcagacaatctagacaaaattcacgacgaaaatggaaacaatctattacatattgcggcgtcacagggacacgcagagtgtctacagcacctcacttctttgatgggagaagactgcctcaatgagcgcaacactgagaagttgactccagcaggcctggccattaagaatggtcagttggagtgcgtacgctggatggtgagcgaaacagaagccattgcagaactgagttgttctaaggattttccaagccttattcattacgcaggttgctatggccaggaaaagattcttctgtggcttcttcagtttatgcaagaacagggcatctcgttggatgaagtagaccaggatggcaacagtgccgttcacgtagcctcacagcatggctaccttggatgcatacagaccttggttgaatatggagcaaatgtcaccatgcagaaccacgctggggaaaagccctcccagagcgccgagcggcaggggcacaccctgtgctccaggtacctggtggtggtggagacctgcatgtcgctggcctctcaagtggtgaagttaaccaagcagctaaaggaacaaacagtagaacgtgtcacgctgcagaaccaactccaacaatttctagaagcccagaaatcagagggcaagtcactcccttcttcacccagttcaccatcctcacctgcctccagaaagtcccagtggaaatctccagatgcagatgatgattctgtagccaaaagcaagccaggagtccaagaggggattcaggttcttggaagcctgtcagcctccagccgggctagacccaaagcaaaagatgaagattctgataaaatcttacgccagttattgggaaaggaaatctcagaaaatgtctgcacccaggaaaaactgtccttggaattccaggatgctcaggcttcctctagaaattctaaaaagatcccactggagaagagggaactgaagttagccaggctgagacagctgatgcagaggtcactgagtgagtctgacacagactccaacaactctgaggaccccaagactaccccagtgaggaaggctgaccgaccaaggccgcagcccattgtagaaagcgtagagagtatggacagcgcagaaagcctgcacctgatgattaagaaacacaccttggcatcagggggacgcaggtttcctttcagcatcaaggcctccaaatccctggatggccacagcccatctcccacctcagagagcagcgaaccagacttagaatcccagtatccaggctcagggagtattcctccaaaccagccctctggtgaccctcagcagcccagccctgacagtactgctgcccagaaagttgccacaagtcccaagagtgccctcaagtctccatcttccaagcgtaggacatctcagaacttaaaactgagagttacctttgaggagcctgtggtgcagatggagcagcctagccttgaactgaatggagaaaaagacaaagataagggcaggactctccagcggacctccacaagtaacgaatcgggggatcaactgaaaaggccttttggagcctttcgatctatcatggagacactaagtggcaaccaaaacaataataataactaccaggcagccaaccagctgaaaacctctacattgcccttgacctcacttgggaggaagacagatgccaagggaaaccctgccagctccgctagcaaaggaaagaataaggcagaaatgtacagcagctgcatcaatctttcctctaacatgctgattgaagagcatctgtgtaacgacacacggcataatgacatcaatagaaaaatgaagaaatcctacagcataaagcacattgctgagccagagtcaaaagaactcttcttgtaaatcactttttaaattttctctcactgatgccctttggaaattattggaaatttctggactatcctctttggaaagagaaccatgaaaacaatgcctcaccagcagaagaacagaatatcaggatgccttaaatttatagtagtagactgtaaaagattcattttggggtgatatctgtatatataacttgtttttttaaaagatgccgtttaaaagcatgattgggaaaatgtatgttttttaagagtagattgattcaccctacccacaggacattcaccaagccactgataccattttatatttcatcaattgcatgagtatttgctaatgttgattgaacctccctttccccataatgtgggcagatttggctcagctccttcatgagatcaggtcagtggtattgtttctgtcaagagtgttttttctgtcatttctactttttgtataaaggaaataaaacaatgttaacagcc

SEQ ID NO: 1646 - protein, 597 aa, Homo sapiens
MGEDCLNERNTEKLTPAGLAIKNGQLECVRWMVSETEAIAELSCSKDFPSLIHYAGCYGQEKILLWLLQFMQEQGISLDEVDQDGNSAVHVASQHGYLGCIQTLVEYGANVTMQNHAGEKPSQSAERQGHTLCSRYLVVVETCMSLASQVVKLTKQLKEQTVERVTLQNQLQQFLEAQKSEGKSLPSSPSSPSSPASRKSQWKSPDADDDSVAKSKPGVQEGIQVLGSLSASSRARPKAKDEDSDKILRQLLGKEISENVCTQEKLSLEFQDAQASSRNSKKIPLEKRELKLARLRQLMQRSLSESDTDSNNSEDPKTTPVRKADRPRPQPIVESVESMDSAESLHLMIKKHTLASGGRRFPFSIKASKSLDGHSPSPTSESSEPDLESQYPGSGSIPPNQPSGDPQQPSPDSTAAQKVATSPKSALKSPSSKRRTSQNLKLRVTFEEPVVQMEQPSLELNGEKDKDKGRTLQRTSTSNESGDQLKRPFGAFRSIMETLSGNQNNNNNYQAANQLKTSTLPLTSLGRKTDAKGNPASSASKGKNKAEMYSSCINLSSNMLIEEHLCNDTRHNDINRKMKKSYSIKHIAEPESKELFL

SEQ ID NO: 1647 - DNA, 4783 bp, Homo sapiens
gaattctagaggcggcggagggtggcgaggagctctcgctttctctcgctccctccctctccgactccgtctctctctctctctctctctctcccctccctctctttccctctgttccattttttccccctctaaatcctccctgccctgcgcgcctggacacagatttaggaagcgaattcgctcacgttttaggacaaggaagagagagaggcacgggagaagagcccagcaagatttggattgaaaccgagacaccctccggaggctcggagcagaggaaggaggaggagggcggcgaacggaagccagtttgcaattcaagttttgatagcgctggtagaagggggtttaaatcagatttttttttttttaaaggagagagactttttccgctctctcgctccctgttaaagccgggtctagcacagctgcagacgccaccagcgagaaagagggagaggaagacagatagggggcgggggaagaagaaaaagaaaggtaaaaagtcttctaggagaacctttcacatttgcaacaaaagacctaggggctggagagagattcctgggacgcagggctggagtgtctatttcgagctcagcggcagggctcgggcgcgagtcgagaccctgctcgctcctctcgcttctgaaaccgacgttcaggagcggctttttaaaaacgcaaggcacaaggacggtcacccgcgcgactatgtttgctgatttttcgccttgccctctttaaaagcggcctcccattctccaaaagacacttcccctcctccctttgaagtgcattagttgtgatttctgcctccttttcttttttctttcttttttgttttgctttttccccccttttgaattatgtgctgctgttaaacaacaacaaaaaaacaacaaaacacagcagctgcggacttgtccccggctggagcccagcgccccgcctggagtggatgagcctctccatgagagatccggtcattcctgggacaagcatggcctaccatccgttcctacctcaccgggcgccggacttcgccatgagcgcggtgctgggtcaccagccgccgttcttccccgcgctgacgctgcctcccaacggcgcggcggcgctctcgctgccgggcgccctggccaagccgatcatggatcaattggtgggggcggccgagaccggcatcccgttctcctccctggggccccaggcgcatctgaggcctttgaagaccatggagcccgaagaagaggtggaggacgaccccaaggtgcacctggaggctaaagaactttgggatcagtttcacaagcggggcaccgagatggtcattaccaagtcgggaaggcgaatgtttcctccatttaaagtgagatgttctgggctggataaaaaagccaaatacattttattgatggacattatagctgctgatgactgtcgttataaatttcacaattctcggtggatggtggctggtaaggccgaccccgaaatgccaaagaggatgtacattcacccggacagccccgctactggggaacagtggatgtccaaagtcgtcactttccacaaactgaaactcaccaacaacatttcagacaaacatggatttactttggccttcccaagtgatcacgctacgtggcaggggaattatagttttggtactcagactatattgaactccatgcacaaataccagccccggttccacattgtaagagccaatgacatcttgaaactcccttatagtacatttcggacatacttgttccccgaaactgaattcatcgctgtgactgcataccagaatgataagataacccagttaaaaatagacaacaacccttttgcaaaaggtttccgggacactggaaatggccgaagagaaaaaagaaaacagctcaccctgcagtccatgagggtgtttgatgaaagacacaaaaaggagaatgggacctctgatgagtcctccagtgaacaagcagctttcaactgcttcgcccaggcttcttctccagccgcctccactgtagggacatcgaacctcaaagatttatgtcccagcgagggtgagagcgacgccgaggccgagagcaaagaggagcatggccccgaggcctgcgacgcggccaagatctccaccaccacgtcggaggagccctgccgtgacaagggcagccccgcggtcaaggctcaccttttcgctgctgagcggccccgggacagcgggcggctggacaaagcgtcgcccgactcacgccatagccccgccaccatctcgtccagcactcgcggcctgggcgcggaggagcgcaggagcccggttcgcgagggcacagcgccggccaaggtggaagaggcgcgcgcgctcccgggcaaggaggccttcgcgccgctcacggtgcagacggacgcggccgccgcgcacctggcccagggccccctgcctggcctcggcttcgccccgggcctggcgggccaacagttcttcaacgggcacccgctcttcctgcaccccagccagtttgccatggggggcgccttctccagcatggcggccgctggcatgggtcccctcctggccacggtttctggggcctccaccggtgtctcgggcctggattccacggccatggcctctgccgctgcggcgcagggactgtccggggcgtccgcggccaccctgcccttccacctccagcagcacgtcctggcctctcagggcctggccatgtcccctttcggaagcctgttcccttacccctacacgtacatggccgcagcggcggccgcctcctctgcggcagcctccagctcggtgcaccgccaccccttcctcaatctgaacaccatgcgcccgcggctgcgctacagcccctactccatcccggtgccggtcccggacggcagcagtctgctcaccaccgccctgccctccatggcggcggccgcggggcccctggacggcaaagtcgccgccctggccgccagcccggcctcggtggcagtggactcgggctctgaactcaacagccgctcctccacgctctcctccagctccatgtccttgtcgcccaaactctgcgcggagaaagaggcggccaccagcgaactgcagagcatccagcggttggttagcggcttggaagccaagccggacaggtcccgcagcgcgtccccgtagacccgtcccagacacgtcttttcattccagtccagttcaggctgccgtgcactttgtcggatataaaataaaccacgggcccgccatggcgttagcccttccttttgcagttgcgtctgggaaggggccccggactccctcgagagaatgtgctagagacagcccctgtcttcttggcgtggtttatatgtccgggatctggatcagattctgggggctcagaaacgtcggttgcattgagctactgggggtaggagttccaacatttatgtccagagcaacttccagcaaggctggtctgggtctctgcccaccaggcggggaggtgttcaaagacatctccctcagtgcggatttatatatatatttttccttcactgtgtcaagtggaaacaaaaacaaaatctttcaaaaaaaaaatcgggacaagtgaacacattaacatgattctgtttgtgcagattaaaaactttatagggacttgcattatcggttctcaataaattactgagcagctttgtttggggagggaagtccctaccatccttgtttagtctatattaagaaaatctgtgtctttttaatattcttgtgatgttttcagagccgctgtaggtctcttcttgcatgtccacagtaatgtatttgtggtttttattttgaacgcttgcttttagagagaaaacaatatagccccctacccttttcccaatcctttgccctcaaatcagtgacccaagggagggggggatttaaagggaaggagtgggcaaaacacataaaatgaatttattatatctaagctctgtagcaggattcatgtcgttctttgacagttctttctctttcctgtatatgcaataacaaggttttaaaaaaataataaagaagtgagactattagacaaagtatttatgtaattatttgataactcttgtaaataggtggaatatgaatgcttggaaaattaaactttaatttattgacattgtacatagctctgtgtaaatagaattgcaactgtcaggttttgtgttcttgttttcctttagttgggtttatttccaggtcacagaattgctgttaacactagaaaacacacttcctgcaccaacaccaataccctttcaaaagagttgtctgcaacatttttgttttcttttttaatgtccaaaagtgggggaaagtgctatttcctattttcaccaaaattggggaaggagtgccactttccagctccacttcaaattccttaaaatataactgagattgctgtggggagggaggagggcagaggctgcggtttgactttttaatttttcttttgttatttgtatttgctagtctctgatttcctcaaaacgaagtggaatttactactgttgtcagtatcggtgttttgaattggtgcctgcctatagagatatattcacagttcaaaagtcaggtgctgagagatggtttaaagacaaattcatgaaggtatattttgtgttatagttgttgatgagttctttggttttctgtatttttccccctctctttaaaacatcactgaaatttcaataaatttttattgaaatgtct

SEQ ID NO: 1648 - protein, 743 aa, Homo sapiens
MSLSMRDPVIPGTSMAYHPFLPHRAPDFAMSAVLGHQPPFFPALTLPPNGAAALSLPGALAKPIMDQLVGAAETGIPFSSLGPQAHLRPLKTMEPEEEVEDDPKVHLEAKELWDQFHKRGTEMVITKSGRRMFPPFKVRCSGLDKKAKYILLMDIIAADDCRYKFHNSRWMVAGKADPEMPKRMYIHPDSPATGEQWMSKVVTFHKLKLTNNISDKHGFTLAFPSDHATWQGNYSFGTQTILNSMHKYQPRFHIVRANDILKLPYSTFRTYLFPETEFIAVTAYQNDKITQLKIDNNPFAKGFRDTGNGRREKRKQLTLQSMRVFDERHKKENGTSDESSSEQAAFNCFAQASSPAASTVGTSNLKDLCPSEGESDAEAESKEEHGPEACDAAKISTTTSEEPCRDKGSPAVKAHLFAAERPRDSGRLDKASPDSRHSPATISSSTRGLGAEERRSPVREGTAPAKVEEARALPGKEAFAPLTVQTDAAAAHLAQGPLPGLGFAPGLAGQQFFNGHPLFLHPSQFAMGGAFSSMAAAGMGPLLATVSGASTGVSGLDSTAMASAAAAQGLSGASAATLPFHLQQHVLASQGLAMSPFGSLFPYPYTYMAAAAAASSAAASSSVHRHPFLNLNTMRPRLRYSPYSIPVPVPDGSSLLTTALPSMAAAAGPLDGKVAALAASPASVAVDSGSELNSRSSTLSSSSMSLSPKLCAEKEAATSELQSIQRLVSGLEAKPDRSRSASP

SEQ ID NO: 1649 - DNA, 4723 bp, Homo sapiens
gaattctagaggcggcggagggtggcgaggagctctcgctttctctcgctccctccctctccgactccgtctctctctctctctctctctctcccctccctctctttccctctgttccattttttccccctctaaatcctccctgccctgcgcgcctggacacagatttaggaagcgaattcgctcacgttttaggacaaggaagagagagaggcacgggagaagagcccagcaagatttggattgaaaccgagacaccctccggaggctcggagcagaggaaggaggaggagggcggcgaacggaagccagtttgcaattcaagttttgatagcgctggtagaagggggtttaaatcagatttttttttttttaaaggagagagactttttccgctctctcgctccctgttaaagccgggtctagcacagctgcagacgccaccagcgagaaagagggagaggaagacagatagggggcgggggaagaagaaaaagaaaggtaaaaagtcttctaggagaacctttcacatttgcaacaaaagacctaggggctggagagagattcctgggacgcagggctggagtgtctatttcgagctcagcggcagggctcgggcgcgagtcgagaccctgctcgctcctctcgcttctgaaaccgacgttcaggagcggctttttaaaaacgcaaggcacaaggacggtcacccgcgcgactatgtttgctgatttttcgccttgccctctttaaaagcggcctcccattctccaaaagacacttcccctcctccctttgaagtgcattagttgtgatttctgcctccttttcttttttctttcttttttgttttgctttttccccccttttgaattatgtgctgctgttaaacaacaacaaaaaaacaacaaaacacagcagctgcggacttgtccccggctggagcccagcgccccgcctggagtggatgagcctctccatgagagatccggtcattcctgggacaagcatggcctaccatccgttcctacctcaccgggcgccggacttcgccatgagcgcggtgctgggtcaccagccgccgttcttccccgcgctgacgctgcctcccaacggcgcggcggcgctctcgctgccgggcgccctggccaagccgatcatggatcaattggtgggggcggccgagaccggcatcccgttctcctccctggggccccaggcgcatctgaggcctttgaagaccatggagcccgaagaagaggtggaggacgaccccaaggtgcacctggaggctaaagaactttgggatcagtttcacaagcggggcaccgagatggtcattaccaagtcgggaaggcgaatgtttcctccatttaaagtgagatgttctgggctggataaaaaagccaaatacattttattgatggacattatagctgctgatgactgtcgttataaatttcacaattctcggtggatggtggctggtaaggccgaccccgaaatgccaaagaggatgtacattcacccggacagccccgctactggggaacagtggatgtccaaagtcgtcactttccacaaactgaaactcaccaacaacatttcagacaaacatggatttactatattgaactccatgcacaaataccagccccggttccacattgtaagagccaatgacatcttgaaactcccttatagtacatttcggacatacttgttccccgaaactgaattcatcgctgtgactgcataccagaatgataagataacccagttaaaaatagacaacaacccttttgcaaaaggtttccgggacactggaaatggccgaagagaaaaaagaaaacagctcaccctgcagtccatgagggtgtttgatgaaagacacaaaaaggagaatgggacctctgatgagtcctccagtgaacaagcagctttcaactgcttcgcccaggcttcttctccagccgcctccactgtagggacatcgaacctcaaagatttatgtcccagcgagggtgagagcgacgccgaggccgagagcaaagaggagcatggccccgaggcctgcgacgcggccaagatctccaccaccacgtcggaggagccctgccgtgacaagggcagccccgcggtcaaggctcaccttttcgctgctgagcggccccgggacagcgggcggctggacaaagcgtcgcccgactcacgccatagccccgccaccatctcgtccagcactcgcggcctgggcgcggaggagcgcaggagcccggttcgcgagggcacagcgccggccaaggtggaagaggcgcgcgcgctcccgggcaaggaggccttcgcgccgctcacggtgcagacggacgcggccgccgcgcacctggcccagggccccctgcctggcctcggcttcgccccgggcctggcgggccaacagttcttcaacgggcacccgctcttcctgcaccccagccagtttgccatggggggcgccttctccagcatggcggccgctggcatgggtcccctcctggccacggtttctggggcctccaccggtgtctcgggcctggattccacggccatggcctctgccgctgcggcgcagggactgtccggggcgtccgcggccaccctgcccttccacctccagcagcacgtcctggcctctcagggcctggccatgtcccctttcggaagcctgttcccttacccctacacgtacatggccgcagcggcggccgcctcctctgcggcagcctccagctcggtgcaccgccaccccttcctcaatctgaacaccatgcgcccgcggctgcgctacagcccctactccatcccggtgccggtcccggacggcagcagtctgctcaccaccgccctgccctccatggcggcggccgcggggcccctggacggcaaagtcgccgccctggccgccagcccggcctcggtggcagtggactcgggctctgaactcaacagccgctcctccacgctctcctccagctccatgtccttgtcgcccaaactctgcgcggagaaagaggcggccaccagcgaactgcagagcatccagcggttggttagcggcttggaagccaagccggacaggtcccgcagcgcgtccccgtagacccgtcccagacacgtcttttcattccagtccagttcaggctgccgtgcactttgtcggatataaaataaaccacgggcccgccatggcgttagcccttccttttgcagttgcgtctgggaaggggccccggactccctcgagagaatgtgctagagacagcccctgtcttcttggcgtggtttatatgtccgggatctggatcagattctgggggctcagaaacgtcggttgcattgagctactgggggtaggagttccaacatttatgtccagagcaacttccagcaaggctggtctgggtctctgcccaccaggcggggaggtgttcaaagacatctccctcagtgcggatttatatatatatttttccttcactgtgtcaagtggaaacaaaaacaaaatctttcaaaaaaaaaatcgggacaagtgaacacattaacatgattctgtttgtgcagattaaaaactttatagggacttgcattatcggttctcaataaattactgagcagctttgtttggggagggaagtccctaccatccttgtttagtctatattaagaaaatctgtgtctttttaatattcttgtgatgttttcagagccgctgtaggtctcttcttgcatgtccacagtaatgtatttgtggtttttattttgaacgcttgcttttagagagaaaacaatatagccccctacccttttcccaatcctttgccctcaaatcagtgacccaagggagggggggatttaaagggaaggagtgggcaaaacacataaaatgaatttattatatctaagctctgtagcaggattcatgtcgttctttgacagttctttctctttcctgtatatgcaataacaaggttttaaaaaaataataaagaagtgagactattagacaaagtatttatgtaattatttgataactcttgtaaataggtggaatatgaatgcttggaaaattaaactttaatttattgacattgtacatagctctgtgtaaatagaattgcaactgtcaggttttgtgttcttgttttcctttagttgggtttatttccaggtcacagaattgctgttaacactagaaaacacacttcctgcaccaacaccaataccctttcaaaagagttgtctgcaacatttttgttttcttttttaatgtccaaaagtgggggaaagtgctatttcctattttcaccaaaattggggaaggagtgccactttccagctccacttcaaattccttaaaatataactgagattgctgtggggagggaggagggcagaggctgcggtttgactttttaatttttcttttgttatttgtatttgctagtctctgatttcctcaaaacgaagtggaatttactactgttgtcagtatcggtgttttgaattggtgcctgcctatagagatatattcacagttcaaaagtcaggtgctgagagatggtttaaagacaaattcatgaaggtatattttgtgttatagttgttgatgagttctttggttttctgtatttttccccctctctttaaaacatcactgaaatttcaataaatttttattgaaatgtct

SEQ ID NO: 1650 - protein, 723 aa, Homo sapiens
MSLSMRDPVIPGTSMAYHPFLPHRAPDFAMSAVLGHQPPFFPALTLPPNGAAALSLPGALAKPIMDQLVGAAETGIPFSSLGPQAHLRPLKTMEPEEEVEDDPKVHLEAKELWDQFHKRGTEMVITKSGRRMFPPFKVRCSGLDKKAKYILLMDIIAADDCRYKFHNSRWMVAGKADPEMPKRMYIHPDSPATGEQWMSKVVTFHKLKLTNNISDKHGFTILNSMHKYQPRFHIVRANDILKLPYSTFRTYLFPETEFIAVTAYQNDKITQLKIDNNPFAKGFRDTGNGRREKRKQLTLQSMRVFDERHKKENGTSDESSSEQAAFNCFAQASSPAASTVGTSNLKDLCPSEGESDAEAESKEEHGPEACDAAKISTTTSEEPCRDKGSPAVKAHLFAAERPRDSGRLDKASPDSRHSPATISSSTRGLGAEERRSPVREGTAPAKVEEARALPGKEAFAPLTVQTDAAAAHLAQGPLPGLGFAPGLAGQQFFNGHPLFLHPSQFAMGGAFSSMAAAGMGPLLATVSGASTGVSGLDSTAMASAAAAQGLSGASAATLPFHLQQHVLASQGLAMSPFGSLFPYPYTYMAAAAAASSAAASSSVHRHPFLNLNTMRPRLRYSPYSIPVPVPDGSSLLTTALPSMAAAAGPLDGKVAALAASPASVAVDSGSELNSRSSTLSSSSMSLSPKLCAEKEAATSELQSIQRLVSGLEAKPDRSRSASP

SEQ ID NO: 1651 - DNA, 2049 bp, Homo sapiens
tcacccgcgcgactatgtttgctgatttttcgccttgccctctttaaaagcggcctcccattctccaaaagacacttcccctcctccctttgaagtgcattagttgtgatttctgcctccttttcttttttctttcttttttgttttgctttttccccccttttgaattatgtgctgctgttaaacaacaacaaaaaaacaacaaaacacagcagctgcggacttgtccccggctggagcccagcgccccgcctggagtggatgagcctctccatgagagatccggtcattcctgggacaagcatggcctaccatccgttcctacctcaccgggcgccggacttcgccatgagcgcggtgctgggtcaccagccgccgttcttccccgcgctgacgctgcctcccaacggcgcggcggcgctctcgctgccgggcgccctggccaagccgatcatggatcaattggtgggggcggccgagaccggcatcccgttctcctccctggggccccaggcgcatctgaggcctttgaagaccatggagcccgaagaagaggtggaggacgaccccaaggtgcacctggaggctaaagaactttgggatcagtttcacaagcggggcaccgagatggtcattaccaagtcgggaaggcgaatgtttcctccatttaaagtgagatgttctgggctggataaaaaagccaaatacattttattgatggacattatagctgctgatgactgtcgttataaatttcacaattctcggtggatggtggctggtaaggccgaccccgaaatgccaaagaggatgtacattcacccggacagccccgctactggggaacagtggatgtccaaagtcgtcactttccacaaactgaaactcaccaacaacatttcagacaaacatggatttactttggccttcccaagtgatcacgctacgtggcaggggaattatagttttggtactcagactatattgaactccatgcacaaataccagccccggttccacattgtaagagccaatgacatcttgaaactcccttatagtacatttcggacatacttgttccccgaaactgaattcatcgctgtgactgcataccagaatgataagataacccagttaaaaatagacaacaacccttttgcaaaaggtttccgggacactggaaatggccgaagagaaaaaagaaaacagctcaccctgcagtccatgagggtgtttgatgaaagacacaaaaaggagaatgggacctctgatgagtcctccagtgaacaagcagctttcaactgcttcgcccaggcttcttctccagccgcctccactgtagggacatcgaacctcaaagatttatgtcccagcgagggtgagagcgacgccgaggccgagagcaaagaggagcatggccccgaggcctgcgacgcggccaagatctccaccaccacgtcggaggagccctgccgtgacaagggcagccccgcggtcaaggctcaccttttcgctgctgagcggccccgggacagcgggcggctggacaaagcgtcgcccgactcacgccatagccccgccaccatctcgtccagcactcgcggcctgggcgcggaggagcgcaggagcccggttcgcgagggcacagcgccggccaaggtggaagaggcgcgcgcgctcccgggcaaggaggccttcgcgccgctcacgcggcgggcctcctctgcggcagcctccagctcggtgcaccgccaccccttcctcaatctgaacaccatgcgcccgcggctgcgctacagcccctactccatcccggtgccggtcccggacggcagcatcgccgccctggccgccagcccggcctcggtggcagtggactcgggctctgaactcaacagccgctcctccacgctctcctccagctccatgtccttgtcgcccaaactctgcgcggagaaagaggcggccaccagcgaactgcagagcatccagcggttggttagcggcttggaagccaagccggacaggtcccgcagcgcgtccccgtag

SEQ ID NO: 1652 - protein, 595 aa, Homo sapiens
MSLSMRDPVIPGTSMAYHPFLPHRAPDFAMSAVLGHQPPFFPALTLPPNGAAALSLPGALAKPIMDQLVGAAETGIPFSSLGPQAHLRPLKTMEPEEEVEDDPKVHLEAKELWDQFHKRGTEMVITKSGRRMFPPFKVRCSGLDKKAKYILLMDIIAADDCRYKFHNSRWMVAGKADPEMPKRMYIHPDSPATGEQWMSKVVTFHKLKLTNNISDKHGFTLAFPSDHATWQGNYSFGTQTILNSMHKYQPRFHIVRANDILKLPYSTFRTYLFPETEFIAVTAYQNDKITQLKIDNNPFAKGFRDTGNGRREKRKQLTLQSMRVFDERHKKENGTSDESSSEQAAFNCFAQASSPAASTVGTSNLKDLCPSEGESDAEAESKEEHGPEACDAAKISTTTSEEPCRDKGSPAVKAHLFAAERPRDSGRLDKASPDSRHSPATISSSTRGLGAEERRSPVREGTAPAKVEEARALPGKEAFAPLTRRASSAAASSSVHRHPFLNLNTMRPRLRYSPYSIPVPVPDGSIAALAASPASVAVDSGSELNSRSSTLSSSSMSLSPKLCAEKEAATSELQSIQRLVSGLEAKPDRSRSASP

SEQ ID NO: 1653 - DNA, 2894 bp, Homo sapiens
tggccgcgggagccgggacggcgggccccgcttccggcccgggcgtcgtgcgtgacccagcggcgtcacagccgaggaagcggcccggccgggagggcggggagggcgcgcggcgatcggacacgatggcgggaggaggcgggagtagcgacggcagcgggcgggcagctggcaggcgggcgtcccgcagtagcgggcgggcccggcgggggcgccacgagccggggctggggggcccggcggagcgcggcgcgggggaggcacggctggaagaggcagtcaatcgctgggtgctcaagttctacttccacgaggcgctgcgggcctttcggggtagccggtacggggacttcagacagatccgggacatcatgcaggctttgcttgtcaggcccttggggaaggagcacaccgtgtcccgattgctgcgggttatgcagtgtctgtcgcggattgaagaaggggaaaatttagactgttcctttgatatggaggctgagctcacaccactggaatcagctatcaatgtgctggagatgattaaaacggaatttacactgacagaagcagtggtcgaatccagtagaaaactggtcaaggaagctgctgtcattatttgtatcaaaaacaaagaatttgaaaaggcttcaaaaattttgaaaaaacatatgtccaaggaccccacaactcagaagctgagaaatgatctcctgaatattattcgagaaaagaacttggcccatcctgttatccagaacttttcatatgagaccttccagcagaagatgctgcgcttcctggagagccacctggatgacgccgagccctacctcctcacgatggccaaaaaggctttgaaatctgagtccgctgcctcaagtacagggaaggaagataaacagccagcaccagggcctgtggaaaagccacccagagaacccgcaaggcagctacggaatcctccaaccaccattggaatgatgactctgaaagcagctttcaagactctgtctggtgcacaggattctgaggcagcctttgcaaaactggaccagaaggatctggttcttcctactcaagctctcccagcatcaccagccctcaaaaacaagagacccagaaaagatgaaaacgaaagttcagccccggctgacggtgagggtggctcggaactgcagcccaagaacaagcgcatgacaataagcagattggtcttggaggaggacagccagagtactgagcccagcgcaggcctcaactcctcccaggaggccgcttcagcgccaccatccaagcccaccgttctcaaccaacccctccctggagagaagaatcccaaagtacccaaaggcaagtggaacagctctaatggggttgaagaaaaggagacttgggtggaagaggatgaactgtttcaagttcaggcagcaccagatgaagacagtacaaccaatataacaaaaaagcagaagtggactgtagaagaaagcgagtgggtcaaggctggagtgcagaaatatggggaaggaaactgggctgccatttctaaaaattacccatttgttaaccgaacagctgtgatgattaaggatcgctggcggaccatgaaaagacttggcatgaactgaaacaggctttcatttccacagaattcacaggagcatggttcctaataatagcccctgatagtctgctctttctttctttttcttttttttttttttttgagacagagtctcgctctgtcacccaggctggagtgcagtggcgtgatctcggctcactgcgacctccgtctcccgggctcacgccattctcctgcctcagcctcccgagtagctgggactacaggcgcccgccatcacgcccggctaatgttttgtatttttagtagagacggggtttcaccgtgttagccaggatggtctcgatctcctgacctcgtgatccacccaactcggcctcccaaagtgctgggattacaggcatgagccaccgcgcctggcatctgctgtttctttcagaagctgggctgggatgagaattttgggcaacctccttcgacgtgggggaggtcccatttccacttcatcactgttggagatcatggagctaagaagcagagccaagtccacccatgtccttggcagagatgacaggcacacagcttgtgcagtgccagaatatcattagcgtttcccttctttagtggtttgcttaaatttaaatccctggtaatctgtagaaccttctcctaggaaatggtgaagtctattaggagccacttgtgactccatgacctgttaaaaccagcaatgtgagtattatttggagtaaatttgttccacgtcaagttctggccttctgatgcaaatgcaaaggaacttagtctgttatgaacccaggttgatgacagaccagtccttgtggaataagattccctttaaaaactctttagccagtcgtgacatcaaccctagacctgtctgccttggcatttgctgtcaacatctgctgggctatgtaggcaggttaatcctccacttctcatgtggttgaaccagtgtgttttttggtaaaatggtgattgtagataagattagttccctgatcccctgccccctgtcccctgcctcttttcccaattcccttccttatgctggacttttaaagcttaaaaaaaatccgattgaatataaatgcctaatttcattctttgtgaaatggttgcttcctcctgattccctaattgtgctgtgttcgtgtcttgcactggaattcaacattcccttctccttttgtactgtgttgtgcttgctgtctctcccggacacccttaaagactgtctttttagcaaaaaatttcagtaaagtgttttctgtaatcttttttt

SEQ ID NO: 1654 - protein, 500 aa, Homo sapiens
MAGGGGSSDGSGRAAGRRASRSSGRARRGRHEPGLGGPAERGAGEARLEEAVNRWVLKFYFHEALRAFRGSRYGDFRQIRDIMQALLVRPLGKEHTVSRLLRVMQCLSRIEEGENLDCSFDMEAELTPLESAINVLEMIKTEFTLTEAVVESSRKLVKEAAVIICIKNKEFEKASKILKKHMSKDPTTQKLRNDLLNIIREKNLAHPVIQNFSYETFQQKMLRFLESHLDDAEPYLLTMAKKALKSESAASSTGKEDKQPAPGPVEKPPREPARQLRNPPTTIGMMTLKAAFKTLSGAQDSEAAFAKLDQKDLVLPTQALPASPALKNKRPRKDENESSAPADGEGGSELQPKNKRMTISRLVLEEDSQSTEPSAGLNSSQEAASAPPSKPTVLNQPLPGEKNPKVPKGKWNSSNGVEEKETWVEEDELFQVQAAPDEDSTTNITKKQKWTVEESEWVKAGVQKYGEGNWAAISKNYPFVNRTAVMIKDRWRTMKRLGMN

SEQ ID NO: 1655 - DNA, 3174 bp, Homo sapiens
ggggactggggatcccgccgccgggccgcagcatggggcgcttccgcgggggcctgcggtgcatcaagtacctgctgcttggcttcaacctgctcttctggctggctggatcggccgtcattgcttttggactatggtttcggttcggaggtgccataaaggagttatcatcagaggacaagtccccagagtatttctatgtggggctgtatgttctggttggagccggggccctgatgatggccgtggggttcttcgggtgctgcggagccatgcgggagtcgcaatgtgtgcttggatcattttttacctgcctcctggtgatatttgctgctgaagtaaccactggagtatttgcttttataggcaagggggtagctatccgacatgttcagaccatgtatgaagaggcttacaatgattaccttaaagacaggggaaaaggcaatgggacactcatcaccttccactcaacatttcagtgctgtggaaaagaaagctccgaacaggtccaacctacatgcccaaaggagcttctaggacacaagaattgcatcgatgaaattgagaccataatcagtgttaagctccagctcattggaattgtcggtattggaattgcaggtctgacgatctttggcatgatattcagcatggtcctctgctgtgcgatacgaaactcacgagatgtgatatgaagctacttctacatgaaaattgcaatctaaagctttcataccaaatgtcacaggagctgtctcccagctcatttttaacactgaaatgacattaggatctaaaataatttgctgtcaattgtacatttgcatgagtacgtatgtttggctcattactggtttaccccttgagtgaatgcctgtttatgatgactgagagcatattcatgtgtgatctgcgtgtttctggaatatgctttatacgtaatgaaatctgtttgctgggaattcctgattcttgttatataagaagaacaacctatttcgctcccagaaaaaaaagatcaaagagctttcagaaactttgagaacttggctatttagaaaaagtgataatgggtcagtttctcagactgtagccattgaaaattagatgcagagaattcagagatttcttcttaatggaagtaataagctgtaagaattgagagatcacaatggagtgttaaaactgactgtgtctaagttgggtgtaagggtttcctgggtttttttatatacatgctctccccagaatacagtaaaccacagttttagaactaaacacatctgtaaaactaaatatagcatggaaaatccaatttgaataagtcatgctttcctagaatttaaaaataaaaaagtcttcctctggaaagagaagtcacacagacaatcatgtgccctataaaagtgagtgtttataggactaaaaaacttttaacaactttttaaggaaatatttttgttcttatacaaaaacatgtaaatattgctttattactttcattttctgaccctgctgtaaactactgcaaccctcacatcctcaaagggacttttatgtcaaactcttctgtttctccaaatataaggaaaaaagactaaagcaagagatctggcagttgaaaattgtgggaaagagaatttgtatgggcactgtatctatgaaatacctcataacttacgtttacatgttttcctaactttttgtatttttcttgtatagccacctagagaattcttcatagattaagaactacagttttcaccacttaacataagtaaaacaaagtccttcataatttaaccattagcatctttggccaaaccaaaataaagaaaagcatcttctcctagttgtgtgtgggcaacagaaacaagttaaggaaacaaaaatacttatatatacacagaacaaaaataatgttctttttatgcaaatcccctgtgaaaataaaattttcaatgtttttttggtcttaacgcttcattttaacttagtaaacccaaatttaggatttacattggcaaatttttcagtgatttttaacgtgttacatttagtaaaccatagattttttaaaaactacattttgtaaggccacacataagtgaaaatacggaaggctttggaaacccccagatgaacttctatacatgtgaaaacacaagtctttgagtgtgcactaaaagtgtcacactcccaaaaaactcacaaaacattttgctaaaaagatatgactgcttgaaatagtctctctcccatggagaaccacatttctctttctgccatacttgctactgctactgattttggaggaaatttttctagaagaacaaaggtcatatttgaggcaagctaaaaacttaattatacatggctactttactgtgtctgtagctaaagaaaaattattttacaaaaattacttcatgaaatatagtttgtaccccagtagttgagaaatgtgaccttttaggcaaagaacaggcagtccatctctcttagctttagtttatctctctgcctgaagacaggaaacaggcccaagtgcatactcgggttctttccaactcagaatcatctctgattccacaaaagtgagtttagtttcctatctgaattaacaactttaaaggagactataatagttaaaagtggaagaatagaaataaataaatttaaaatgaaattaattaaagtagaagagaagggttctgttccatgtacgattaatgtgccccttttggagataagctttccaaaatatgcgtatgagtaaaattagagaattccaccactaagcaacaatagattttatatgtgtgtgtggatatatatacacacacacacagaaagatgaatatatatatatatatatctgtatagacacacatataatatatatagatatataatccctatatatcttgaatctacaaatatctttatatgtatataatttgaatatatacatgtatgtatatacagatgtgtgtgtatatatatatatacatacacatatacataaattttcagctatttctgttcccctgaactaatttgagattagacccaaacatgcttttaaatgtctcatgccaaggcactgaattaagacttcttaatgttgaaatattttaagtgatttcatattaaattttctatatactg

SEQ ID NO: 1656 - protein, 221 aa, Homo sapiens
MGRFRGGLRCIKYLLLGFNLLFWLAGSAVIAFGLWFRFGGAIKELSSEDKSPEYFYVGLYVLVGAGALMMAVGFFGCCGAMRESQCVLGSFFTCLLVIFAAEVTTGVFAFIGKGVAIRHVQTMYEEAYNDYLKDRGKGNGTLITFHSTFQCCGKESSEQVQPTCPKELLGHKNCIDEIETIISVKLQLIGIVGIGIAGLTIFGMIFSMVLCCAIRNSRDVI

SEQ ID NO: 1657 - DNA, 3127 bp, Homo sapiens
cgcctcaggcgactggttgttaccgaggaagatggcggcgccagacccgaggcgctagggaagatcgcaccgcggacgcccgctgagcttggcgcacgggccgaccaggagctggtgactgccctcatgtgtgatttgcggcggccagcggcaggtgggatgatggacttggcctacgtctgtgagtgggagaaatggtccaagagcacccactgcccatcggtgcccctggcctgcgcctggtcctgccgaaatctcatcgccttcaccatggacctgcgcagcgatgaccaggacctgacccgcatgatccacatcctggacacggagcacccctgggacctgcactcgatcccctcagagcaccacgaggccatcacctgcctggagtgggaccagtcaggctcccggctcctgtcagcagatgccgacgggcagatcaagtgctggagcatggcggaccacctggctaatagctgggagagctcagtgggcagcctagtggagggggaccccattgtggccctgtcctggctgcacaatggtgtgaaactggccctgcacgtggagaagtcgggcgcctccagcttcggggagaagttctcccgagtcaagttctcaccgtcgctcacgctgttcggcggcaagcccatggagggctggatcgcggtgacggtcagcggcctggtcaccgtgtccctgctgaagcccagcgggcaggtgctgacgtccaccgagagcctgtgccggctgcgcggccgcgtggccctggccgacatcgccttcaccggcggcggcaacatcgtggtggccacggcggacggcagcagcgcgtcgcccgtgcagttctacaaggtgtgcgtgagcgtggtgagcgagaagtgccgtatcgacacggagatcctgccctccctgttcatgcgctgcaccaccgacctcaaccgcaaggacaagtttcccgccatcacccacctcaagttcctggcccgggacatgtcggagcaggtgcttttgtgcgcgtccagccagaccagcagcatcgtggagtgctggtccctgcgcaaggagggactccccgtgaacaacatcttccagcagatctcccccgtggttggcgacaaacagcccacaattctcaaatggcggatcctatcggccaccaacgatctggaccgtgtgtcggccgtggcgctgcccaagctgcccatctcgctcaccaacaccgacctcaaggtggccagcgacacacagttctaccctggcctcgggctggccctggccttccacgacggcagcgtccacatcgtgcaccggctctcactgcagaccatggccgtcttctacagctccgcggccccgaggcctgtggatgagccggccatgaagcgcccccgcaccgcgggccccgccgtccacttaaaggctatgcagctatcgtggacgtcactggccctggtggggattgacagccacgggaagctgagcgtgctccgcctctcaccttccatgggccacccgctggaggtggggctggcgctgcggcacctgctcttcctgctggagtactgcatggtgaccggctacgactggtgggacatcctgctgcacgtgcagcccagtatggtacagagcctggtggagaagctgcacgaggagtacacgcgccagaccgctgccctgcagcaggtcctctccacccggatcctggccatgaaggcctcgctctgcaagctgtcgccctgcacggtgacccgcgtgtgcgactaccacaccaagctcttcctcatcgccatcagctccaccctgaagtcgctgctgcgcccccactttctcaacacgcctgacaagagccccggcgaccggctgaccgagatctgcaccaagatcaccgacgtcgacattgacaaggtcatgatcaacctcaagacggaggaatttgtgctggacatgaacacactgcaggcgctgcagcagctcttgcagtgggtgggcgacttcgtgctgtacctgctggccagcctacccaaccagggttccctgctgaggccgggccacagctttctgcgggacggcacctcgctgggcatgcttcgggaattgatggtggtcatccgcatctggggccttctgaagcccagctgcctgcccgtgtatacggccacctcggatacccaggacagcatgtccctgctcttccgcctgctcaccaagctctggatctgctttcctagcacaggtccatgctctgtgtgggtgcttttgggatggcagccacttccaggcacctgtcgcgatgagggcccagcgagcgagccggacgaggcgctggtggatgaatgctgcctgctgcccagccagctgcttatccccagcctggactggctgccagccagcgacggcctggttagccgcctgcagcccaagcagccccttcgtctgcagtttggccgggcgcccacgctgcctggcagtgctgccaccctgcagctcgacggcctcgccagggccccaggccagcccaagatcgaccacctgcggaggctgcaccttggcgcttgccccacggaggaatgcaaggcctgcaccaggtgcggctgtgtcaccatgctcaagtcgcccaacagaaccacggcggtgaagcagtgggagcagcgctggatcaagaactgcctgtgcggtgggctctggtggcgggtgcccctcagctacccctgagcccagctgcccctcagctactcctcagctacccctcagctgcccctgagcccggctgctgcaagagccaccgctcgccctggactctcctcggcgcggttaacctcagcccgccctgcagggctgttgaaggccgtgggccggacgcctgcgtgaccagcagagcttctgaggaagcccctgcctttgtccagctgggcccgcagtccacacaccactctcccaggacccccagatccctggaccatctgcatccagaggaccgtccgtgacggccgggggtccaggcggaccttgtggtgacccggctcgggcgtctcctcggtttccttgcctcacccgcggagagcgctgaacctggacaagcagcggctgggaaggacaggtccaataaacgccctctgcgcccagg

SEQ ID NO: 1658 - protein, 862 aa, Homo sapiens
MCDLRRPAAGGMMDLAYVCEWEKWSKSTHCPSVPLACAWSCRNLIAFTMDLRSDDQDLTRMIHILDTEHPWDLHSIPSEHHEAITCLEWDQSGSRLLSADADGQIKCWSMADHLANSWESSVGSLVEGDPIVALSWLHNGVKLALHVEKSGASSFGEKFSRVKFSPSLTLFGGKPMEGWIAVTVSGLVTVSLLKPSGQVLTSTESLCRLRGRVALADIAFTGGGNIVVATADGSSASPVQFYKVCVSVVSEKCRIDTEILPSLFMRCTTDLNRKDKFPAITHLKFLARDMSEQVLLCASSQTSSIVECWSLRKEGLPVNNIFQQISPVVGDKQPTILKWRILSATNDLDRVSAVALPKLPISLTNTDLKVASDTQFYPGLGLALAFHDGSVHIVHRLSLQTMAVFYSSAAPRPVDEPAMKRPRTAGPAVHLKAMQLSWTSLALVGIDSHGKLSVLRLSPSMGHPLEVGLALRHLLFLLEYCMVTGYDWWDILLHVQPSMVQSLVEKLHEEYTRQTAALQQVLSTRILAMKASLCKLSPCTVTRVCDYHTKLFLIAISSTLKSLLRPHFLNTPDKSPGDRLTEICTKITDVDIDKVMINLKTEEFVLDMNTLQALQQLLQWVGDFVLYLLASLPNQGSLLRPGHSFLRDGTSLGMLRELMVVIRIWGLLKPSCLPVYTATSDTQDSMSLLFRLLTKLWICFPSTGPCSVWVLLGWQPLPGTCRDEGPASEPDEALVDECCLLPSQLLIPSLDWLPASDGLVSRLQPKQPLRLQFGRAPTLPGSAATLQLDGLARAPGQPKIDHLRRLHLGACPTEECKACTRCGCVTMLKSPNRTTAVKQWEQRWIKNCLCGGLWWRVPLSYP

SEQ ID NO: 1659 - DNA, 2922 bp, Homo sapiens
cagaagtctttgggaggcggccccacgcctcaggcgactggttgttaccgaggaagatggcggcgccagacccgaggcgctagggaagatcgcaccgcggacgcccgctgagcttggcgcacgggccgaccaggagctggtgactgccctcatgtgtgatttgcggcggccagcggcaggtgggatgatggacttggcctacgtctgtgagtgggagaaatggtccaagagcacccactgcccatcggtgcccctggcctgcgcctggtcctgccgaaatctcatcgccttcaccatggacctgcgcagcgatgaccaggacctgacccgcatgatccacatcctggacacggagcacccctgggacctgcactcgatcccctcagagcaccacgaggccatcacctgcctggagtgggaccagtcaggctcccggctcctgtcagcagatgccgacgggcagatcaagtgctggagcatggcggaccacctggctaatagctgggagagctcagtgggcagcctagtggagggggaccccattgtggccctgtcctggctgcacaatggtgtgaaactggccctgcacgtggagaagtcgggcgcctccagcttcggggagaagttctcccgagtcaagttctcaccgtcgctcacgctgttcggcggcaagcccatggagggctggatcgcggtgacggtcagcggcctggtcaccgtgtccctgctgaagcccagcgggcaggtgctgacgtccaccgagagcctgtgccggctgcgcggccgcgtggccctggccgacatcgccttcaccggcggcggcaacatcgtggtggccacggcggacggcagcagcgcgtcgcccgtgcagttctacaaggtgtgcgtgagcgtggtgagcgagaagtgccgtatcgacacggagatcctgccctccctgttcatgcgctgcaccaccgacctcaaccgcaaggacaagtttcccgccatcacccacctcaagttcctggcccgggacatgtcggagcaggtgcttttgtgcgcgtccagccagaccagcagcatcgtggagtgctggtccctgcgcaaggagggactccccgtgaacaacatcttccagcagatctcccccgtggttggcgacaaacagcccacaattctcaaatggcggatcctatcggccaccaacgatctggaccgtgtgtcggccgtggcgctgcccaagctgcccatctcgctcaccaacaccgacctcaaggtggccagcgacacacagttctaccctggcctcgggctggccctggccttccacgacggcagcgtccacatcgtgcaccggctctcactgcagaccatggccgtcttctacagctccgcggccccgaggcctgtggatgagccggccatgaagcgcccccgcaccgcgggccccgccgtccacttaaaggctatgcagctatcgtggacgtcactggccctggtggggattgacagccacgggaagctgagcgtgctccgcctctcaccttccatgggccacccgctggaggtggggctggcgctgcggcacctgctcttcctgctggagtactgcatggtgaccggctacgactggtgggacatcctgctgcacgtgcagcccagtatggtacagagcctggtggagaagctgcacgaggagtacacgcgccagaccgctgccctgcagcaggtcctctccacccggatcctggccatgaaggcctcgctctgcaagctgtcgccctgcacggtgacccgcgtgtgcgactaccacaccaagctcttcctcatcgccatcagctccaccctgaagtcgctgctgcgcccccactttctcaacacgcctgacaagagccccggcgaccggctgaccgagatctgcaccaagatcaccgacgtcgacattgacaaggtcatgatcaacctcaagacggaggaatttgtgctggacatgaacacactgcaggcgctgcagcagctcttgcagtgggtgggcgacttcgtgctgtacctgctggccagcctacccaaccagggttccctgctgaggccgggccacagctttctgcgggacggcacctcgctgggcatgcttcgggaattgatggtggtcatccgcatctggggccttctgaagcccagctgcctgcccgtgtatacggccacctcggatacccaggacagcatgtccctgctcttccgcctgctcaccaagctctggatctgctgtcgcgatgagggcccagcgagcgagccggacgaggcgctggtggatgaatgctgcctgctgcccagccagctgcttatccccagcctggactggctgccagccagcgacggcctggttagccgcctgcagcccaagcagccccttcgtctgcagtttggccgggcgcccacgctgcctggcagtgctgccaccctgcagctcgacggcctcgccagggccccaggccagcccaagatcgaccacctgcggaggctgcaccttggcgcttgccccacggaggaatgcaaggcctgcaccaggtgcggctgtgtcaccatgctcaagtcgcccaacagaaccacggcggtgaagcagtgggagcagcgctggatcaagaactgcctggctgttgaaggccgtgggccggacgcctgcgtgaccagcagagcttctgaggaagcccctgcctttgtccagctgggcccgcagtccacacaccactctcccaggacccccagatccctggaccatctgcatccagaggaccgtccgtgacggccgggggtccaggcggaccttgtggtgacccggctcgggcgtctcctcggtttccttgcctcacccgcggagagcgctgaacctggacaagcagcggctgggaaggacaggtccaataaacgccctctgcgccc

SEQ ID NO: 1660 - protein, 877 aa, Homo sapiens
MCDLRRPAAGGMMDLAYVCEWEKWSKSTHCPSVPLACAWSCRNLIAFTMDLRSDDQDLTRMIHILDTEHPWDLHSIPSEHHEAITCLEWDQSGSRLLSADADGQIKCWSMADHLANSWESSVGSLVEGDPIVALSWLHNGVKLALHVEKSGASSFGEKFSRVKFSPSLTLFGGKPMEGWIAVTVSGLVTVSLLKPSGQVLTSTESLCRLRGRVALADIAFTGGGNIVVATADGSSASPVQFYKVCVSVVSEKCRIDTEILPSLFMRCTTDLNRKDKFPAITHLKFLARDMSEQVLLCASSQTSSIVECWSLRKEGLPVNNIFQQISPVVGDKQPTILKWRILSATNDLDRVSAVALPKLPISLTNTDLKVASDTQFYPGLGLALAFHDGSVHIVHRLSLQTMAVFYSSAAPRPVDEPAMKRPRTAGPAVHLKAMQLSWTSLALVGIDSHGKLSVLRLSPSMGHPLEVGLALRHLLFLLEYCMVTGYDWWDILLHVQPSMVQSLVEKLHEEYTRQTAALQQVLSTRILAMKASLCKLSPCTVTRVCDYHTKLFLIAISSTLKSLLRPHFLNTPDKSPGDRLTEICTKITDVDIDKVMINLKTEEFVLDMNTLQALQQLLQWVGDFVLYLLASLPNQGSLLRPGHSFLRDGTSLGMLRELMVVIRIWGLLKPSCLPVYTATSDTQDSMSLLFRLLTKLWICCRDEGPASEPDEALVDECCLLPSQLLIPSLDWLPASDGLVSRLQPKQPLRLQFGRAPTLPGSAATLQLDGLARAPGQPKIDHLRRLHLGACPTEECKACTRCGCVTMLKSPNRTTAVKQWEQRWIKNCLAVEGRGPDACVTSRASEEAPAFVQLGPQSTHHSPRTPRSLDHLHPEDRP

SEQ ID NO: 1661 - DNA, 3161 bp, Homo sapiens
ggccccacgcctcaggcgactggttgttaccgaggaagatggcggcgccagacccgaggcgctagggaagatcgcaccgcggacgcccgctgagcttggcgcacgggccgaccaggagctggtgactgccctcatgtgtgatttgcggcggccagcggcaggtgggatgatggacttggcctacgtctgtgagtgggagaaatggtccaagagcacccactgcccatcggtgcccctggcctgcgcctggtcctgccgaaatctcatcgccttcaccatggacctgcgcagcgatgaccaggacctgacccgcatgatccacatcctggacacggagcacccctgggacctgcactcgatcccctcagagcaccacgaggccatcacctgcctggagtgggaccagtcaggctcccggctcctgtcagcagatgccgacgggcagatcaagtgctggagcatggcggaccacctggctaatagctgggagagctcagtgggcagcctagtggagggggaccccattgtggccctgtcctggctgcacaatggtgtgaaactggccctgcacgtggagaagtcgggcgcctccagcttcggggagaagttctcccgagtcaagttctcaccgtcgctcacgctgttcggcggcaagcccatggagggctggatcgcggtgacggtcagcggcctggtcaccgtgtccctgctgaagcccagcgggcaggtgctgacgtccaccgagagcctgtgccggctgcgcggccgcgtggccctggccgacatcgccttcaccggcggcggcaacatcgtggtggccacggcggacggcagcagcgcgtcgcccgtgcagttctacaaggtgtgcgtgagcgtggtgagcgagaagtgccgtatcgacacggagatcctgccctccctgttcatgcgctgcaccaccgacctcaaccgcaaggacaagtttcccgccatcacccacctcaagttcctggcccgggacatgtcggagcaggtgcttttgtgcgcgtccagccagaccagcagcatcgtggagtgctggtccctgcgcaaggagggactccccgtgaacaacatcttccagcagatctcccccgtggttggcgacaaacagcccacaattctcaaatggcggatcctatcggccaccaacgatctggaccgtgtgtcggccgtggcgctgcccaagctgcccatctcgctcaccaacaccgacctcaaggtggccagcgacacacagttctaccctggcctcgggctggccctggccttccacgacggcagcgtccacatcgtgcaccggctctcactgcagaccatggccgtcttctacagctccgcggccccgaggcctgtggatgagccggccatgaagcgcccccgcaccgcgggccccgccgtccacttaaaggctatgcagctatcgtggacgtcactggccctggtggggattgacagccacgggaagctgagcgtgctccgcctctcaccttccatgggccacccgctggaggtggggctggcgctgcggcacctgctcttcctgctggagtactgcatggtgaccggctacgactggtgggacatcctgctgcacgtgcagcccagtatggtacagagcctggtggagaagctgcacgaggagtacacgcgccagaccgctgccctgcagcaggtcctctccacccggatcctggccatgaaggcctcgctctgcaagctgtcgccctgcacggtgacccgcgtgtgcgactaccacaccaagctcttcctcatcgccatcagctccaccctgaagtcgctgctgcgcccccactttctcaacacgcctgacaagagccccggcgaccggctgaccgagatctgcaccaagatcaccgacgtcgacattgacaaggtcatgatcaacctcaagacggaggaatttgtgctggacatgcactgcaggcgctgcagcagctcttgcagtgggtgggcgacttcgtgctgtacctgctggccagcctacccaaccagccctcccccacctcggagccctcccccacctcggagccctgccccacctcggagccctcccccacctcggagccctcctctccatgaagcctctgctggttccctgctgaggccgggccacagctttctgcgggacggcacctcgctgggcatgcttcgggaattgatggtggtcatccgcatctggggccttctgaagcccagctgcctgcccgtgtatacggccacctcggatacccaggacagcatgtccctgctcttccgcctgctcaccaagctctggatctgctgtcgcgatgagggcccagcgagcgagccggacgaggcgctggtggatgaatgctgcctgctgcccagccagctgcttatccccagcctggactggctgccagccagcgacggcctggttagccgcctgcagcccaagcagccccttcgtctgcagtttggccgggcgcccacgctgcctggcagtgctgccaccctgcagctcgacggcctcgccagggccccaggccagcccaagatcgaccacctgcggaggctgcaccttggcgcttgccccacggaggaatgcaaggcctgcaccaggtgcggctgtgtcaccatgctcaagtcgcccaacagaaccacggcggtgaagcagtgggagcagcgctggatcaagaactgcctgtgcggtgggctctggtggcgggtgcccctcagctacccctgagcccagctgcccctcagctactcctcagctacccctcagctgcccctgagcccggctgctgcaagagccaccgctcgccctggactctcctcggcgcggttaacctcagcccgccctgcagggctgttgaaggccgtgggccggacgcctgcgtgaccagcagagcttctgaggaagcccctgcctttgtccagctgggcccgcagtccacacaccactctcccaggacccccagatccctggaccatctgcatccagaggaccgtccgtgacggccgggggtccaggcggaccttgtggtgacccggctcgggcgtctcctcggtttccttgcctcacccgcggagagcgctgaacctggacaagcagcggctgggaaggacaggtccaataaacgccctctgcgccc

SEQ ID NO: 1662 - protein, 872 aa, Homo sapiens
MCDLRRPAAGGMMDLAYVCEWEKWSKSTHCPSVPLACAWSCRNLIAFTMDLRSDDQDLTRMIHILDTEHPWDLHSIPSEHHEAITCLEWDQSGSRLLSADADGQIKCWSMADHLANSWESSVGSLVEGDPIVALSWLHNGVKLALHVEKSGASSFGEKFSRVKFSPSLTLFGGKPMEGWIAVTVSGLVTVSLLKPSGQVLTSTESLCRLRGRVALADIAFTGGGNIVVATADGSSASPVQFYKVCVSVVSEKCRIDTEILPSLFMRCTTDLNRKDKFPAITHLKFLARDMSEQVLLCASSQTSSIVECWSLRKEGLPVNNIFQQISPVVGDKQPTILKWRILSATNDLDRVSAVALPKLPISLTNTDLKVASDTQFYPGLGLALAFHDGSVHIVHRLSLQTMAVFYSSAAPRPVDEPAMKRPRTAGPAVHLKAMQLSWTSLALVGIDSHGKLSVLRLSPSMGHPLEVGLALRHLLFLLEYCMVTGYDWWDILLHVQPSMVQSLVEKLHEEYTRQTAALQQVLSTRILAMKASLCKLSPCTVTRVCDYHTKLFLIAISSTLKSLLRPHFLNTPDKSPGDRLTEICTKITDVDIDKVMINLKTEEFVLDMHCRRCSSSCSGWATSCCTCWPAYPTSPPPPRSPPPPRSPAPPRSPPPPRSPPLHEASAGSLLRPGHSFLRDGTSLGMLRELMVVIRIWGLLKPSCLPVYTATSDTQDSMSLLFRLLTKLWICCRDEGPASEPDEALVDECCLLPSQLLIPSLDWLPASDGLVSRLQPKQPLRLQFGRAPTLPGSAATLQLDGLARAPGQPKIDHLRRLHLGACPTEECKACTRCGCVTMLKSPNRTTAVKQWEQRWIKNCLCGGLWWRVPLSYP

SEQ ID NO: 1663 - DNA, 2875 bp, Homo sapiens
ggccccacgcctcaggcgactggttgttaccgaggaagatggcggcgccagacccgaggcgctagggaagatcgcaccgcggacgcccgctgagcttggcgcacgggccgaccaggagctggtgactgccctcatgtgtgatttgcggcggccagcggcaggtgggatgatggacttggcctacgtctgtgagtgggagaaatggtccaagagcacccactgcccatcggtgcccctggcctgcgcctggtcctgccgaaatctcatcgccttcaccatggacctgcgcagcgatgaccaggacctgacccgcatgatccacatcctggacacggagcacccctgggacctgcactcgatcccctcagagcaccacgaggccatcacctgcctggagtgggaccagtcaggctcccggctcctgtcagcagatgccgacgggcagatcaagtgctggagcatggcggaccacctggctaatagctgggagagctcagtgggcagcctagtggagggggaccccattgtggccctgtcctggctgcacaatggtgtgaaactggccctgcacgtggagaagtcgggcgcctccagcttcggggagaagttctcccgagtcaagttctcaccgtcgctcacgctgttcggcggcaagcccatggagggctggatcgcggtgacggtcagcggcctggtcaccgtgtccctgctgaagcccagcgggcaggtgctgacgtccaccgagagcctgtgccggctgcgcggccgcgtggccctggccgacatcgccttcaccggcggcggcaacatcgtggtggccacggcggacggcagcagcgcgtcgcccgtgcagttctacaaggtgtgcgtgagcgtggtgagcgagaagtgccgtatcgacacggagatcctgccctccctgttcatgcgctgcaccaccgacctcaaccgcaaggacaagtttcccgccatcacccacctcaagttcctggcccgggacatgtcggagcaggtgcttttgtgcgcgtccagccagaccagcagcatcgtggagtgctggtccctgcgcaaggagggactccccgtgaacaacatcttccagcagatctcccccgtggttggcgacaaacagcccacaattctcaaatggcggatcctatcggccaccaacgatctggaccgtgtgtcggccgtggcgctgcccaagctgcccatctcgctcaccaacaccgacctcaaggtggccagcgacacacagttctaccctggcctcgggctggccctggccttccacgacggcagcgtccacatcgtgcaccggctctcactgcagaccatggccgtcttctacagctccgcggccccgaggcctgtggatgagccggccatgaagcgcccccgcaccgcgggccccgccgtccacttaaaggctatgcagctatcgtggacgtcactggccctggtggggattgacagccacgggaagctgagcgtgctccgcctctcaccttccatgggccacccgctggaggtggggctggcgctgcggcacctgctcttcctgctggagtactgcatggtgaccggctacgactggtgggacatcctgctgcacgtgcagcccagtatggtacagagcctggtggagaagctgcacgaggagtacacgcgccagaccgctgccctgcagcaggtcctctccacccggatcctggccatgaaggcctcgctctgcaagctgtcgccctgcacggtgacccgcgtgtgcgactaccacaccaagctcttcctcatcgccatcagctccaccctgaagtcgctgctgcgcccccactttctcaacacgcctgacaagagccccggcgaccggctgaccgagatctgcaccaagatcaccgacgtcgacattgacaaggtcatgatcaacctcaagacggaggaatttgtgctggacatgaacacactgcaggcgctgcagcagctcttgcagtgggtgggcgacttcgtgctgtacctgctggccagcctacccaaccaggtcgcgatgagggcccagcgagcgagccggacgaggcgctggtggatgaatgctgcctgctgcccagccagctgcttatccccagcctggactggctgccagccagcgacggcctggttagccgcctgcagcccaagcagccccttcgtctgcagtttggccgggcgcccacgctgcctggcagtgctgccaccctgcagctcgacggcctcgccagggccccaggccagcccaagatcgaccacctgcggaggctgcaccttggcgcttgccccacggaggaatgcaaggcctgcaccaggtgcggctgtgtcaccatgctcaagtcgcccaacagaaccacggcggtgaagcagtgggagcagcgctggatcaagaactgcctgtgcggtgggctctggtggcgggtgcccctcagctacccctgagcccagctgcccctcagctactcctcagctacccctcagctgcccctgagcccggctgctgcaagagccaccgctcgccctggactctcctcggcgcggttaacctcagcccgccctgcagggctgttgaaggccgtgggccggacgcctgcgtgaccagcagagcttctgaggaagcccctgcctttgtccagctgggcccgcagtccacacaccactctcccaggacccccagatccctggaccatctgcatccagaggaccgtccgtgacggccgggggtccaggcggaccttgtggtgacccggctcgggcgtctcctcggtttccttgcctcacccgcggagagcgctgaacctggacaagcagcggctgggaaggacaggtccaataaacgccctctgcgccc

SEQ ID NO: 1664 - protein, 576 aa, Homo sapiens
MEGWIAVTVSGLVTVSLLKPSGQVLTSTESLCRLRGRVALADIAFTGGGNIVVATADGSSASPVQFYKVCVSVVSEKCRIDTEILPSLFMRCTTDLNRKDKFPAITHLKFLARDMSEQVLLCASSQTSSIVECWSLRKEGLPVNNIFQQISPVVGDKQPTILKWRILSATNDLDRVSAVALPKLPISLTNTDLKVASDTQFYPGLGLALAFHDGSVHIVHRLSLQTMAVFYSSAAPRPVDEPAMKRPRTAGPAVHLKAMQLSWTSLALVGIDSHGKLSVLRLSPSMGHPLEVGLALRHLLFLLEYCMVTGYDWWDILLHVQPSMVQSLVEKLHEEYTRQTAALQQVLSTRILAMKASLCKLSPCTVTRVCDYHTKLFLIAISSTLKSLLRPHFLNTPDKSPGDRLTEICTKITDVDIDKVMINLKTEEFVLDMNTLQALQQLLQWVGDFVLYLLASLPNQVAMRAQRASRTRRWWMNAACCPASCLSPAWTGCQPATAWLAACSPSSPFVCSLAGRPRCLAVLPPCSSTASPGPQASPRSTTCGGCTLALAPRRNARPAPGAAVSPCSSRPTEPRR

SEQ ID NO: 1665 - DNA, 3542 bp, Homo sapiens
gtgcgcgtgtgcgtgtgcgcgtgtgcgagtgtgaagtgcagcgctggagtgcaacatgctgtaatgggaggaaacccagcggcgtcggagcgcccgggaccgccgcggccgttctgagcgcagtggcgccgagcagcccctcccgcagccggtgtgacctgtcccttcaggctccaaccaggaatggagacgccattggatgttttgtccagggcagcatctctggtgcatgctgatgacgaaaaacgcgaagctgctctcaggggagaacccagaatacagaccctgccggtggcctctgccctcagcagtcaccgcaccggccctcccccaatcagccccagcaagaggaagttcagcatggagccaggtgacgaggacctagactgtgacaacgaccacgtctccaaaatgagtcgcatcttcaacccccatctgaacaagactgccaatggagactgccgcagagacccccgggagcggagccgcagccccatcgagcgcgctgtggcccccaccatgagcctgcacggcagccacctgtacacctccctccccagccttggcctggagcagcccctcgcactgaccaagaacagcctggacgccagcaggccagccggcctctcgcccacactgaccccgggggagcggcagcagaaccggccctccgtgatcacctgtgcctcggctggcgcccgcaactgcaacctctcgcactgccccatcgcgcacagcggctgtgccgcgcccgggcctgccagctaccggaggccaccgagcgctgccaccacctgtgaccccgtggtggaggagcatttccgcaggagcctgggcaagaattacaaggagcccgagccggcacccaactccgtgtccatcacgggctccgtggacgaccactttgccaaagctctgggtgacacgtggctccagatcaaagcggccaaggacggagcatccagcagccctgagtccgcctctcgcaggggccagcccgccagcccctctgcccacatggtcagccacagtcactccccctctgtggtctcctgaagggagcgcctcctccaacaacacgtggatctgcatggtttgcctgagctttgaacagtcagtacttaaaaaaaaaaaaatcatgggggtggggtggggggaagggaagggatggtttatttgcaaaaaccatgttgttgggatttgtgttctgtttttgtacttgcttggtatccgtacaagggggccctcaaacatgatagcaggaactacgcgtggaacatctgtctaatgtagcatccttacttcctgcctcagttaccaaagaaacctctgatgcaggtctgctgccccgacggggccaggactccacagcgctttctcagtcacaagccatgatgaattggtgactcagacgctttgtgctttttcctttgcttcttgagaccggggtgtgtgtggctcagcttccacggcgtgtttggttcggtccatgtgtgtgcgtgtgtatacttgaagagaactgtcgtgtctgatttgcactattggaggaggactaaagttgcctgacaactttatgtgttatgccagaactctgagggcaaactgctgaaaaacaaagggtttaaggatgacatttctgaccatttgtgtgtttgttgttgttactgtttttgttttttttaatgtagacaatacagctttggaaggggaagtctcatacaggttataggtctttctctctctagatttcaggtgcttgcaactggactgcagactctaccaatcacgggcattttatcttctctgaacactgcagtttgttagactagagctgaggttggaggattccatagtgctttaaacgtgatgcatgttttaatggagaaaaaatagctggtttctattaattatatagacagtaaacaaaaaccttaatacttactatcttcttttcagaattagtttatttttgtcagttacagtcctagatatacttactgctggtacagttgtactctaagattggtatttgatattcactttactcacaagtagtgcgggaggccagctcctggcaggccctcgcgatgagcagtgggtcagctgcggtgtgggatgctggagtttggctgcaggctgacatcatttatttttgcatccctgtctgctttgttacaagctcccaggggaggtggggtttgtgtcttccaacttccctacatgcagaaactgctccctttgaactctcttggctgaacagcagattactgacagacaatctgtgatatggtgttttatacgcttcctcgtacgctggggccaaggcagtatacattcctctgactttatactgttattactgcatttattatttgctatattaatagctactaactagaaattagatgaagcaagcatgacagacacagctgtggaggtcacagctgctcctttttggtcaatgagcgtttctatcccctccccctggggtgtgctgtgtcccacctggcccaccagaggctcacgacgatggcacctgaccaggtgacgtgggcgtggtcacctcacctgcaaggctttgtggactctgcacaccgtatgacccccggttttacagtttttagctgttgaattttggaaattggcactgggtgaaaaggtcggaggactggctcttgtagtcacagagtggctgcaggcctttgaaaagtggaggaaagaaaagcccttctccttgccccgcacacatttcactcccactgtactgggcttccaagctttggcattcaggcccctatattttctgtaggaaaaatcgttgagaacacttttctatatgggtgattttgagaccatcgttacgctgtgcgtaaagaatgtacagagaaatttgtaggtattttttgaagaacattaatttgttaatgatatgtagctatttaatttttccctttcctattgtaatcattcattttttttgttgttcggaaaaaaaaagttgatctttttttttgtcgtagatttgtctgtaaaagtgcaggaacagttattctatgagaacactgcatctgcattcatagccacgagtttgttattgctacaggctactgagcgtcgtaacaggaaaaccacccacagctgaccggctcggtggaggacactcctgggacaggtctctttgtcagtgaacaagggcgtcactctgggaggggtcggcggtgctggcggccgggtccctggtgcactgacctatctgggataggcagtaccctggaggggggcctggggcagaggaggcagcagaaaaccaaacatttcactgagaaagccccctccctgctctaagaaggggctccgtgaagttcttcccagagccgcgctgcctgcagtgcgctctgaccttctcttcatgtgtgtaaatctgtaatataccattctctgtggcctgtttttcctggaagaagaaaaaaaaaggtttggcaggccatctttttttgtacttaaaagtagccttaagaacaataataaagtgctcttaaacc

SEQ ID NO: 1666 - protein, 290 aa, Homo sapiens
METPLDVLSRAASLVHADDEKREAALRGEPRIQTLPVASALSSHRTGPPPISPSKRKFSMEPGDEDLDCDNDHVSKMSRIFNPHLNKTANGDCRRDPRERSRSPIERAVAPTMSLHGSHLYTSLPSLGLEQPLALTKNSLDASRPAGLSPTLTPGERQQNRPSVITCASAGARNCNLSHCPIAHSGCAAPGPASYRRPPSAATTCDPVVEEHFRRSLGKNYKEPEPAPNSVSITGSVDDHFAKALGDTWLQIKAAKDGASSSPESASRRGQPASPSAHMVSHSHSPSVVS

SEQ ID NO: 1667 - DNA, 3786 bp, Homo sapiens
gtcatgccaagcatagccctcatgtcagcgctgccggcttgcagcgggctgtgagaggggccggcgccgctttgtcctaggaaacgggctgcgcgtttctctttttcactcttttccatttccaggaaggacttgtaaggacttctgaaacgctgttttcatactcgatcggggatacagtacatacaccgtctaccagtaagcccttgaagggtttcgtgtgagctcgatttttttgtgcctgatttttttttttttaacttttgcatactttgttttgatagtctgaggctgggcctctgcctttgtgaagttgaagagccaggagctactcagcaacaattgatttttgaaacttaactcttttggggcaaaagcaaagagctggttttctttgctagcccaataaatgctatttatgaagatggacctgttgaactatcagtacttggacaagatgaacaacaatatcggcattctgtgctacgaaggcgaagctgctctcaggggagaacccagaatacagaccctgccggtggcctctgccctcagcagtcaccgcaccggccctcccccaatcagccccagcaagaggaagttcagcatggagccaggtgacgaggacctagactgtgacaacgaccacgtctccaaaatgagtcgcatcttcaacccccatctgaacaagactgccaatggagactgccgcagagacccccgggagcggagccgcagccccatcgagcgcgctgtggcccccaccatgagcctgcacggcagccacctgtacacctccctccccagccttggcctggagcagcccctcgcactgaccaagaacagcctggacgccagcaggccagccggcctctcgcccacactgaccccgggggagcggcagcagaaccggccctccgtgatcacctgtgcctcggctggcgcccgcaactgcaacctctcgcactgccccatcgcgcacagcggctgtgccgcgcccgggcctgccagctaccggaggccaccgagcgctgccaccacctgtgaccccgtggtggaggagcatttccgcaggagcctgggcaagaattacaaggagcccgagccggcacccaactccgtgtccatcacgggctccgtggacgaccactttgccaaagctctgggtgacacgtggctccagatcaaagcggccaaggacggagcatccagcagccctgagtccgcctctcgcaggggccagcccgccagcccctctgcccacatggtcagccacagtcactccccctctgtggtctcctgaagggagcgcctcctccaacaacacgtggatctgcatggtttgcctgagctttgaacagtcagtacttaaaaaaaaaaaaatcatgggggtggggtggggggaagggaagggatggtttatttgcaaaaaccatgttgttgggatttgtgttctgtttttgtacttgcttggtatccgtacaagggggccctcaaacatgatagcaggaactacgcgtggaacatctgtctaatgtagcatccttacttcctgcctcagttaccaaagaaacctctgatgcaggtctgctgccccgacggggccaggactccacagcgctttctcagtcacaagccatgatgaattggtgactcagacgctttgtgctttttcctttgcttcttgagaccggggtgtgtgtggctcagcttccacggcgtgtttggttcggtccatgtgtgtgcgtgtgtatacttgaagagaactgtcgtgtctgatttgcactattggaggaggactaaagttgcctgacaactttatgtgttatgccagaactctgagggcaaactgctgaaaaacaaagggtttaaggatgacatttctgaccatttgtgtgtttgttgttgttactgtttttgttttttttaatgtagacaatacagctttggaaggggaagtctcatacaggttataggtctttctctctctagatttcaggtgcttgcaactggactgcagactctaccaatcacgggcattttatcttctctgaacactgcagtttgttagactagagctgaggttggaggattccatagtgctttaaacgtgatgcatgttttaatggagaaaaaatagctggtttctattaattatatagacagtaaacaaaaaccttaatacttactatcttcttttcagaattagtttatttttgtcagttacagtcctagatatacttactgctggtacagttgtactctaagattggtatttgatattcactttactcacaagtagtgcgggaggccagctcctggcaggccctcgcgatgagcagtgggtcagctgcggtgtgggatgctggagtttggctgcaggctgacatcatttatttttgcatccctgtctgctttgttacaagctcccaggggaggtggggtttgtgtcttccaacttccctacatgcagaaactgctccctttgaactctcttggctgaacagcagattactgacagacaatctgtgatatggtgttttatacgcttcctcgtacgctggggccaaggcagtatacattcctctgactttatactgttattactgcatttattatttgctatattaatagctactaactagaaattagatgaagcaagcatgacagacacagctgtggaggtcacagctgctcctttttggtcaatgagcgtttctatcccctccccctggggtgtgctgtgtcccacctggcccaccagaggctcacgacgatggcacctgaccaggtgacgtgggcgtggtcacctcacctgcaaggctttgtggactctgcacaccgtatgacccccggttttacagtttttagctgttgaattttggaaattggcactgggtgaaaaggtcggaggactggctcttgtagtcacagagtggctgcaggcctttgaaaagtggaggaaagaaaagcccttctccttgccccgcacacatttcactcccactgtactgggcttccaagctttggcattcaggcccctatattttctgtaggaaaaatcgttgagaacacttttctatatgggtgattttgagaccatcgttacgctgtgcgtaaagaatgtacagagaaatttgtaggtattttttgaagaacattaatttgttaatgatatgtagctatttaatttttccctttcctattgtaatcattcattttttttgttgttcggaaaaaaaaagttgatctttttttttgtcgtagatttgtctgtaaaagtgcaggaacagttattctatgagaacactgcatctgcattcatagccacgagtttgttattgctacaggctactgagcgtcgtaacaggaaaaccacccacagctgaccggctcggtggaggacactcctgggacaggtctctttgtcagtgaacaagggcgtcactctgggaggggtcggcggtgctggcggccgggtccctggtgcactgacctatctgggataggcagtaccctggaggggggcctggggcagaggaggcagcagaaaaccaaacatttcactgagaaagccccctccctgctctaagaaggggctccgtgaagttcttcccagagccgcgctgcctgcagtgcgctctgaccttctcttcatgtgtgtaaatctgtaatataccattctctgtggcctgtttttcctggaagaagaaaaaaaaaggtttggcaggccatctttttttgtacttaaaagtagccttaagaacaataataaagtgctcttaaacc

SEQ ID NO: 1668 - protein, 296 aa, Homo sapiens
MLFMKMDLLNYQYLDKMNNNIGILCYEGEAALRGEPRIQTLPVASALSSHRTGPPPISPSKRKFSMEPGDEDLDCDNDHVSKMSRIFNPHLNKTANGDCRRDPRERSRSPIERAVAPTMSLHGSHLYTSLPSLGLEQPLALTKNSLDASRPAGLSPTLTPGERQQNRPSVITCASAGARNCNLSHCPIAHSGCAAPGPASYRRPPSAATTCDPVVEEHFRRSLGKNYKEPEPAPNSVSITGSVDDHFAKALGDTWLQIKAAKDGASSSPESASRRGQPASPSAHMVSHSHSPSVVS

SEQ ID NO: 1669 - DNA, 1815 bp, Homo sapiens
gagcggccaggccagcctcggagccagcagggagctgggagctgggggaaacgacgccaggaaagctatcgcgccagagagggcgacgggggctcgggaagcctgacagggcttttgcgcacagctgccggctggctgctacccgcccgcgccagcccccgagaacgcgcgaccaggcacccagtccggtcaccgcagcggagagctcgccgctcgctgcagcgaggcccggagcggccccgcagggaccctccccagaccgcctgggccgcccggatgtgcactaaaatggaacagcccttctaccacgacgactcatacacagctacgggatacggccgggcccctggtggcctctctctacacgactacaaactcctgaaaccgagcctggcggtcaacctggccgacccctaccggagtctcaaagcgcctggggctcgcggacccggcccagagggcggcggtggcggcagctacttttctggtcagggctcggacaccggcgcgtctctcaagctcgcctcttcggagctggaacgcctgattgtccccaacagcaacggcgtgatcacgacgacgcctacacccccgggacagtacttttacccccgcgggggtggcagcggtggaggtgcagggggcgcagggggcggcgtcaccgaggagcaggagggcttcgccgacggctttgtcaaagccctggacgatctgcacaagatgaaccacgtgacaccccccaacgtgtccctgggcgctaccggggggcccccggctgggcccgggggcgtctacgccggcccggagccacctcccgtttacaccaacctcagcagctactccccagcctctgcgtcctcgggaggcgccggggctgccgtcgggaccgggagctcgtacccgacgaccaccatcagctacctcccacacgcgccgcccttcgccggtggccacccggcgcagctgggcttgggccgcggcgcctccaccttcaaggaggaaccgcagaccgtgccggaggcgcgcagccgggacgccacgccgccggtgtcccccatcaacatggaagaccaagagcgcatcaaagtggagcgcaagcggctgcggaaccggctggcggccaccaagtgccggaagcggaagctggagcgcatcgcgcgcctggaggacaaggtgaagacgctcaaggccgagaacgcggggctgtcgagtaccgccggcctcctccgggagcaggtggcccagctcaaacagaaggtcatgacccacgtcagcaacggctgtcagctgctgcttggggtcaagggacacgccttctgaacgtcccctgcccctttacggacaccccctcgcttggacggctgggcacacgcctcccactggggtccagggagcaggcggtgggcacccaccctgggacctaggggcgccgcaaaccacactggactccggccctcctaccctgcgcccagtccttccacctcgacgtttacaagcccccccttccacttttttttgtatgttttttttctgctggaaacagactcgattcatattgaatataatatatttgtgtatttaacagggaggggaagagggggcgatcgcggcggagctggccccgccgcctggtactcaagcccgcggggacattgggaaggggacccccgccccctgccctcccctctctgcaccgtactgtggaaaagaaacacgcacttagtctctaaagagtttattttaagacgtgtttgtgtttgtgtgtgtttgttctttttattgaatctatttaagtaaaaaaaaaattggttcttt

SEQ ID NO: 1670 - protein, 347 aa, Homo sapiens
MCTKMEQPFYHDDSYTATGYGRAPGGLSLHDYKLLKPSLAVNLADPYRSLKAPGARGPGPEGGGGGSYFSGQGSDTGASLKLASSELERLIVPNSNGVITTTPTPPGQYFYPRGGGSGGGAGGAGGGVTEEQEGFADGFVKALDDLHKMNHVTPPNVSLGATGGPPAGPGGVYAGPEPPPVYTNLSSYSPASASSGGAGAAVGTGSSYPTTTISYLPHAPPFAGGHPAQLGLGRGASTFKEEPQTVPEARSRDATPPVSPINMEDQERIKVERKRLRNRLAATKCRKRKLERIARLEDKVKTLKAENAGLSSTAGLLREQVAQLKQKVMTHVSNGCQLLLGVKGHAF

SEQ ID NO: 1671 - DNA, 1825 bp, Homo sapiens
gcagtgtcactaggccggctgggggccctgggtacgctgtagaccagaccgcgacaggccagaacacgggcggcggcttcgggccgggagacccgcgcagccctcggggcatctcagtgcctcactccccaccccctcccccgggtcgggggaggcggcgcgtccggcggagggttgaggggagcggggcaggcctggagcgccatgagcagcccggatgcgggatacgccagtgacgaccagagccagacccagagcgcgctgcccgcggtgatggccgggctgggcccctgcccctgggccgagtcgctgagccccatcggggacatgaaggtgaagggcgaggcgccggcgaacagcggagcaccggccggggccgcgggccgagccaagggcgagtcccgtatccggcggccgatgaacgctttcatggtgtgggctaaggacgagcgcaagcggctggcgcagcagaatccagacctgcacaacgccgagttgagcaagatgctgggcaagtcgtggaaggcgctgacgctggcggagaagcggcccttcgtggaggaggcagagcggctgcgcgtgcagcacatgcaggaccaccccaactacaagtaccggccgcggcggcgcaagcaggtgaagcggctgaagcgggtggagggcggcttcctgcacggcctggctgagccgcaggcggccgcgctgggccccgagggcggccgcgtggccatggacggcctgggcctccagttccccgagcagggcttccccgccggcccgccgctgctgcctccgcacatgggcggccactaccgcgactgccagagtctgggcgcgcctccgctcgacggctacccgttgcccacgcccgacacgtccccgctggacggcgtggaccccgacccggctttcttcgccgccccgatgcccggggactgcccggcggccggcacctacagctacgcgcaggtctcggactacgctggccccccggagcctcccgccggtcccatgcacccccgactcggcccagagcccgcgggtccctcgattccgggcctcctggcgccacccagcgcccttcacgtgtactacggcgcgatgggctcgcccggggcgggcggcgggcgcggcttccagatgcagccgcaacaccagcaccagcaccagcaccagcaccaccccccgggccccggacagccgtcgccccctccggaggcactgccctgccgggacggcacggaccccagtcagcccgccgagctcctcggggaggtggaccgcacggaatttgaacagtatctgcacttcgtgtgcaagcctgagatgggcctcccctaccaggggcatgactccggtgtgaatctccccgacagccacggggccatttcctcggtggtgtccgacgccagctccgcggtatattactgcaactatcctgacgtgtgacaggtccctgatccgccccagcctgcaggccagaagcagtgttacacacttcctggaggagctaaggaaatcctcagactcctgggtttttgttgttgctgttgttgttttttaaaaggtgtgttggcatataatttatggtaatttattttgtctgccacttgaacagtttgggggggtgaggtttcatttaaaatttgttcagagatttgtttcccatagttggattgtcaaaaccctatttccaagttcaagttaactagctttgaatgtgtcccaaaacagcttcctccatttcctgaaagtttattgatcaaagaaatgttgtcctgggtgtgttttttcaatcttctaaaaaataaaatctggaatcctg

SEQ ID NO: 1672 - protein, 414 aa, Homo sapiens [sequence omitted]

SEQ ID NO: 1673 - DNA, 3062 bp, Homo sapiens
ggggggggcggaggctccgtggaaatgtgtcggtgacattgaatggggagaccgagcgcgagcgaggcgcgcgcgcgcacacgcgcactcacggccccgctcgctccgagatccccggccacgtaagtaactattaataccgcctcgccgggggatgcgggcgtgctgagcgcggggattggcctcgggcaccgtcggccgtcccctttaatttttaaatacacggtcccctcttttctctggggggggcaagcaagaaatcaaagaaggaggagacaagccgtcaattttctccaaaacaaaccccaccgggcaatttggtctcggggtagggggagacggggtgattgcaaattattccaggacgagatccagttctccagcgggaaaggggcaaaggaacgccgcgcgttggaagggccagggacgcagctccccttgcagcgcccgcaggacccccgcaagctcgtgccggcgaaatcggagaccgccgatctgtcctcgttctctcctgcacgtctggctgcattcggaggaagacctggggcgcgagcgagcggcgacagcatgagcctgtgctgacctccgcgcggcgggccgagcccagggctttgtcgcggtacctgcgcccagcccgcgccgcaactctgtgcccagcttttgcaatcttttgttggcagcgctgaccgcaccaagttaaatgctcccttgcaatttttcttttttttgtttgtttgtttaatttttggagagctcgcgatcttggaaaagcctcagacgccatctacagttaaaacgtaggtaactgccctctcccgcaccccccccttacacgccccccaccctttccaccaaaaaaagggggtgcagcgcggattctggctgccgtgcgtcgccagccggtagacccgtgcttgtttcctttctctttttgtttggcttctaacgcgttgggactgagtcgccgccgtgagctccccgaagactgcacaaactaccgcgggctcctccgccccgtctgcgattcggaagccggcctgggggtcgcgtcgggagccctggcgctgcagctccgcaccttagcagcccgggtactcatccagatccacgccggggacacacacacagagtaactaaaagtgcggcgattctgcacatcgccgactgctttggggtaacaaaaagacccgagttgcctgccgaccgaggacccccgggagccgggctcggagcagacgaggtatccggcggcgcccatttgggggcttctaactctttctccacgcagcccctcttctgtcccctcccctctcgctcccttttaaaatcagtggcaccgaggcgcctgcagccgcactcgccagcgactcatctctccagcgggtttttttttgtttgtcgtgtgcgatcctcacactcatgaacatacacaggtctacccccatcacaatagcgagatatgggagatcgcggaacaaaacccaggatttcgaagagttgtcgtctataaggtccgcggagcccagccagagtttcagcccgaacctcggctccccgagcccgcccgagactccgaacttgtcgcattgcgtttcttgtatcgggaaatacttattgttggaacctctggagggagaccacgtttttcgtgccgtgcatctgcacagcggagaggagctggtgtgcaaggtgtttgatatcagctgctaccaggaatccctggcaccgtgcttttgcctgtctgctcatagtaacatcaaccaaatcactgaaattatcctgggtgagaccaaagcctatgtgttctttgagcgaagctatggggacatgcattccttcgtccgcacctgcaagaagctgagagaggaggaggcagccagactgttctaccagattgcctcggcagtggcccactgccatgacggggggctggtgctgcgggacctcaagctgcggaaattcatctttaaggacgaagagaggactcgggtcaagctggaaagcctggaagacgcctacattctgcggggagatgatgattccctctccgacaagcatggctgcccggcttacgtaagcccagagatcttgaacaccagtggcagctactcgggcaaagcagccgacgtgtggagcctgggggtgatgctgtacaccatgttggtggggcggtaccctttccatgacattgaacccagctccctcttcagcaagatccggcgtggccagttcaacattccagagactctgtcgcccaaggccaagtgcctcatccgaagcattctgcgtcgggagccctcagagcggctgacctcgcaggaaattctggaccatccttggttttctacagattttagcgtctcgaattcagcatatggtgctaaggaagtgtctgaccagctggtgccggacgtcaacatggaagagaacttggaccctttctttaactgagctcatgccccacggagacttagcaggttccaggagtgagcgagggcagcggaaaggagttcttccgggggacacgaattgcctggctgagtagcaagaaagacacactcttaagtttcttggttcagagcaggaaaaccttcaaggagctgactgaccacgtagcatgggggcaagaggcgtgggatggggattggggtgagatggatgggagcccgctggagcttgtcttccctaacatagcctgggagaccaccccttgccacttgggccacttccgcctaccccacttttcattttgttccaaaatagttgcagatcctgacagaatcaaaactctctgcctcaaacacacatcctggcatcgcactgttagcatttaacttcttgttaggattcagggaaggaacagttggccaagaattttttttcttttaaacaagccaaccacctagctggtaattaatgaggttcacttaaaaaaaaaattcggtgcacacagactgacatgaaacctgggtgctacagtaaaagaaaacaaaagtccagtttgtgtctcttaatcgctcacttcaactcatttcttctaaataaactatttaatatcctgg

SEQ ID NO: 1674 - protein, 343 aa, Homo sapiens
MNIHRSTPITIARYGRSRNKTQDFEELSSIRSAEPSQSFSPNLGSPSPPETPNLSHCVSCIGKYLLLEPLEGDHVFRAVHLHSGEELVCKVFDISCYQESLAPCFCLSAHSNINQITEIILGETKAYVFFERSYGDMHSFVRTCKKLREEEAARLFYQIASAVAHCHDGGLVLRDLKLRKFIFKDEERTRVKLESLEDAYILRGDDDSLSDKHGCPAYVSPEILNTSGSYSGKAADVWSLGVMLYTMLVGRYPFHDIEPSSLFSKIRRGQFNIPETLSPKAKCLIRSILRREPSERLTSQEILDHPWFSTDFSVSNSAYGAKEVSDQLVPDVNMEENLDPFFN

SEQ ID NO: 1675 - DNA, 987 bp, Homo sapiens
gtgtgactgaagaggagctcacagttcccagcgtctgctcccacggtgtccagcgcccagaatgcggcttctggtcctgctatggggttgcctgctgctcccaggttatgaagccctggagggcccagaggaaatcagcgggttcgaaggggacactgtgtccctgcagtgcacctacagggaagagctgagggaccaccggaagtactggtgcaggaagggtgggatcctcttctctcgctgctctggcaccatctatgcagaagaagaaggccaggagacaatgaagggcagggtgtccatccgtgacagccgccaggagctctcgctcattgtgaccctgtggaacctcaccctgcaagacgctggggagtactggtgtggggtcgaaaaacggggccccgatgagtctttactgatctctctgttcgtctttccagggagctcccgcccccccatgcagctggactccacctcagcagaggacaccagtccagctctcagcagtggcagctctaagcccagggtgtccatcccgatggtccgcatactggccccagtcctggtgctgctgagccttctgtcagccgcaggcctgatcgccttctgcagccacctgctcctgtggagaaaggaagctcaacaggccacggagacacagaggaacgagaagttctgcctctcacgcttgaatcacagaacatcagagctggatccagatgaagcctttgagatctctagcctgacttttctctcagtttgaagcaaatcgcctttcagaacgcccaggggtcagggagctgttagagatgcactctccagggccccagacccagctgaaccctccaggggtggggtccagggactctggcagtgctacaaactctagtgtgcttttacaaaagatgagactgaggcccagagagggtaaaggtcttgcccatggtcacacagcaggtggtggcccaaacagagaacaggacccag

SEQ ID NO: 1676 - protein, 233 aa, Homo sapiens
MRLLVLLWGCLLLPGYEALEGPEEISGFEGDTVSLQCTYREELRDHRKYWCRKGGILFSRCSGTIYAEEEGQETMKGRVSIRDSRQELSLIVTLWNLTLQDAGEYWCGVEKRGPDESLLISLFVFPGSSRPPMQLDSTSAEDTSPALSSGSSKPRVSIPMVRILAPVLVLLSLLSAAGLIAFCSHLLLWRKEAQQATETQRNEKFCLSRLNHRTSELDPDEAFEISSLTFLSV

SEQ ID NO: 1677 - DNA, 2755 bp, Homo sapiens
acagttcccagcgtctgctcccacggtgtccagcgcccagaatgcggcttctggtcctgctatggggttgcctgctgctcccaggttatgaagccctggagggcccagaggaaatcagcgggttcgaaggggacactgtgtccctgcagtgcacctacagggaagagctgagggaccaccggaagtactggtgcaggaagggtgggatcctcttctctcgctgctctggcaccatctatgcagaagaagaaggccaggagacaatgaagggcagggtgtccatccgtgacagccgccaggagctctcgctcattgtgaccctgtggaacctcaccctgcaagacgctggggagtactggtgtggggtcgaaaaacggggccccgatgagtctttactgatctctctgttcgtctttccaggaccctgctgtcctccctccccttctcccaccttccagcctctggctacaacacgcctgcagcccaaggcaaaagctcagcaaacccagcccccaggattgacttctcctgggctctacccggcagccaccacagccaagcaggggaagacaggggctgaggcccctccattgccagggacttcccagtacgggcacgaaaggacttctcagtacacaggaacctctcctcacccagcgacctctcctcctgcagggagctcccgcccccccatgcagctggactccacctcagcagaggacaccagtccagctctcagcagtggcagctctaagcccagggtgtccatcccgatggtccgcatactggccccagtcctggtgctgctgagccttctgtcagccgcaggcctgatcgccttctgcagccacctgctcctgtggagaaaggaagctcaacaggccacggagacacagaggaacgagaagttctgcctctcacgcttgactgcggaggaaaaggaagccccttcccaggcccctgagggggacgtgatctcgatgcctcccctccacacatctgaggaggagctgggcttctcgaagtttgtctcagcgtagggcaggaggccctcctggccaggccagcagtgaagcagtatggctggctggatcagcaccgattcccgaaagctttccacctcagcctcagagtccagctgcccggactccagggctctccccaccctccccaggctctcctcttgcatgttccagcctgacctagaagcgtttgtcagccctggagcccagagcggtggccttgctcttccggctggagactgggacatccctgataggttcacatccctgggcagagtaccaggctgctgaccctcagcagggccagacaaggctcagtggatctggtctgagtttcaatctgccaggaactcctgggcctcatgcccagtgtcggaccctgccttcctcccactccagaccccaccttgtcttccctccctggcgtcctcagacttagtcccacggtctcctgcatcagctggtgatgaagaggagcatgctggggtgagactgggattctggcttctctttgaaccacctgcatcccagcccttcaggaagcctgtgaaaaacgtgattcctgggccccaccaagacccaccaaaaccatctctggggcttggtgcaggactctgaatttctaacaatgcccagtgactgtcgcacttgagtttgagggccagtgggcctgatgaacgctcagacccctccagcttagagtctgcatttgggctgtgacgtctcccacctgccccaataagatctgctctgtctgcgacaccaagatccagctggggactcccctgaggcctgcctaagtccaggccttggtcaggtcaggtgcacattgcagggataagcccaggaccggcagagagtggttgcctttccatttgccctccctggccatgccttcttgcctttggaaaaatgatgaagaaaaccttggctccttccttgtctggaaagggttacttgcctatgggttctggtggctagagagaaaagtagaaaaccagagtgcacgtaggtgtctaacacagaggagagtaggaacagggcggatacctgaaggtgactccgagtccagccccctggagaaggggtcgggggtgggggtaaagtagcacaactactattttttttctttttccattattattgttttttaagacagaatctcgtgctgctgcccaggctggagtgcagtggcacgatctgcaaactccgcctcctgggttcaagtgattcttctgcctcagcctcccgagtagctgggattacaggcacgcaccaccacacctggctaatttttgtacttttagtagagatggggtttcaccatgttggccaggctggtcttgaactcctgacctcaaatgagcctcctgcttcagtctcccaaattgccgggattacaggcatgagccactgtgtctggccctatttcctttaaaaagtgaaattaagagttgttcagtatgcaaaacttggaaagatggaggagaaaaagaaaaggaagaaaaaaatgtcacccatagtctcaccagagactatcattatttcgttttgttgtacttccttccactcttttcttcttcacataatttgccggtgttctttttacagagcaattatcttgtatatacaactttgtatcctgccttttccaccttatcgttccatcactttattccagcacttctctgtgttttacagacctttttataaataaaatgttcatcagctgc

SEQ ID NO: 1678 - protein, 332 aa, Homo sapiens
MRLLVLLWGCLLLPGYEALEGPEEISGFEGDTVSLQCTYREELRDHRKYWCRKGGILFSRCSGTIYAEEEGQETMKGRVSIRDSRQELSLIVTLWNLTLQDAGEYWCGVEKRGPDESLLISLFVFPGPCCPPSPSPTFQPLATTRLQPKAKAQQTQPPGLTSPGLYPAATTAKQGKTGAEAPPLPGTSQYGHERTSQYTGTSPHPATSPPAGSSRPPMQLDSTSAEDTSPALSSGSSKPRVSIPMVRILAPVLVLLSLLSAAGLIAFCSHLLLWRKEAQQATETQRNEKFCLSRLTAEEKEAPSQAPEGDVISMPPLHTSEEELGFSKFVSA

SEQ ID NO: 1679 - DNA, 3632 bp, Homo sapiens
acctcgcgtcttcccaccgcgtcggaggacgtaggcgcctgggatcctggaaggcttcggatgggaagtttgcgttggagtccaacacccgacaggaaccccagttaacgcctccgcatggccaggggcagagttcttgacacctgtagcttaatcaacgcaggtggagattcagggcttgaatcgcccggccacgcgcaagccgcagggcaccctcatactactacttctgccttattacccttaaaactggagtctcagttatttgtatcccactattggtttttttttaaatcttttttcgtgggtttgcccccttttcctcagctgcgtttctgtcttcagtcctgtagggcacaatgtctgaacaagagcgtatacaggaatgtctgcggaaggaaataaggtcacttctcatttccaccaaagatggtttgagcccacaggagttggagaaggagtaccttttgatggttggcaaccatctaccactccgaatccttgggtatcggtccactatggagctggtattggacatgcctgatgttgttcgtgtctgccccggtgcaggtggtactgtaatactgaaagccattccagatgaatctaccaaaggaatagcaagcttagttgcaaaacagaggagcagccataagcttcgaaactcaatgcataagggaagacctagtatttattctggaccgagatctcatcggcgagtaccttaccgaggaagggttgcccctattcttccagctgttgtgaagagtgagttgaaggacctgttggcgttatctcctgttcttctttctgattttgaaaaggcatttgccaaaagatttggacgatcattccaatacatgcaatatggatttctctctatgtttgaagtgcttaatgcggcttcagatgtcatttctgtagagcagaccagagcaggttctttgttgatgctaaagaagagtgtaacagaggaaaagccgagaggatgtccagcaggtaaaatttttacccagccatttagaatgaaacaagggtcatactccacaggctttccggtagcaaagccatgcttttcacaacccacttcaaacatggaaccaccgaagcaaataatgagcatggaaaagacttccaagttaaatgtagtggagacttcaagactgaatcacactgaaaaattaaaccagctggagaacacattcaaatcagttattgcacagattggacctggaggaactatcagttcagaactaaaacataagataaaatttgttgtatctaagttcccagagggtttgtttatttctaaactgcttggagagtatgaggtaatttttaaagagcaactatcaccaaaaaaattaggcttcttaaatgtgacagaacttgttggagctcttagtgacattctccatgttgagttcaggaaaggacaccaagacttactagtgtttgatgcggataagaagcctctaccacctgttcagtcagataagaaaatagaagccaaagcttgtgtctccagtccacctagaaattcattgtctactgctgctgtcaaagagactgtatggaattgcccttcaaaaaaacaaaaagagccacaacagaagatttgcaagaagcctaatctggtggtaaagcctttacagctgcaagtagaaacaaacaaatcagagctcaacttggcaatggcaaatcatgacatcccgccagacgctgtgccgaacaagaaattatgcagactcccaccattagacaccagttccctcataggggtctttgtggagtatatcatctctcctagtcaattctacatccggatctatagcagggattcgtcagagttactcgaagacatgatgattgaaatgcggcgctgttattctaatcagctggtttctgatcgatatgtcatgccagaatgttttattcagccgggacatctctgttgtgtaaggatttctgaggataagtggtggtatcgggtcattatccatcgagtccttgagaaacaggaagttgaagtgttctacccagactttggaaatattggaattgttcagaagtcctccctgaggttcctcaagtgctgctacacaaagcttccagctcaggctatcccttgttctttggcttgggtgagaccagtagaggaacactggacatcgaaagctattttgcagttccagaagttgtgcggtttgaagccattagtgggggtagtggatgaatatgtagatggaatccttaacatttttttgtgtgacacatcctcaaacgaagatgtctatttccatcatgtcttgagaacagagggccatgctattgtatgccgagaaaatatctcttctaagggtttcagtgagctcaaccctttagctttatacacgacatccagtggagggccagaggacattgtcttgacagaactgggttatccttcccagcagcactattttaatgaagaccgaaagataagtccacagtcaaaagagagtgagttacgtatcttggatgagatccccactggaatgccatgcctggagtcagtgaccataggtgatgatatttgggatgagaactggttacctctacaggctaagatgggaaaaggaggtgatgctgcctcccatctatttactgcaagccttggtggaaagaatcagtattcatcatgtaaagaaatgccacagaaggactggtgtttttctacccctaaagatacatgggatgattcttggcagccttcaggccttgtaaatggaacgaaagtagaagttcataagccagaagtactgggtgctcaggaaaaaaatactggcacaaacaggactcaaaagcaactagacataaatggttcttcagattcttccacactgcccaaattggaagaattctgtacctctcttacccagtcagagcagtcagcagacgggagccagtctgaacccaacaacagtcagactcagccaaagcaaattcagctttccacagcagcaccctgttcaacaactgcagtggatgattccgcagaaaagccctctggttctgtggaaagctcaccagagatcctaaagaatgaagatttttctagcagccgtgctattacattgtacaaagacaagcgtcaagaatctgtagaccagctgtctttgattttgtcttatgagtgccagatttctcagaagctctacattcctcgaagtacagccactgctgccttaggtgctgccgcacggttagctacatccaggagcctcctacactggtaccccagtgtgaaaaggatggaagcatgagggagggagggaggagggagaaaaacagaatccagccgcttaggctttgatgaactcccaggccaaaatgaggagttattgaagcaaaatagtatcttgatcattgatacttttgtctttctgtgactatatgttagctttattatgctaacagtctactttgatgtgtaagtaagtattgatatttactgttaatcttgatttttcttgattttattctgtgtcattttgttcacctttgtttttaatgtagtttaaaggaatttgtttttttgtgtttgtttttcttgtacattatcatgactgataaatgaaaattgaaaaact

SEQ ID NO: 1680 - protein, 981 aa, Homo sapiens
MSEQERIQECLRKEIRSLLISTKDGLSPQELEKEYLLMVGNHLPLRILGYRSTMELVLDMPDVVRVCPGAGGTVILKAIPDESTKGIASLVAKQRSSHKLRNSMHKGRPSIYSGPRSHRRVPYRGRVAPILPAVVKSELKDLLALSPVLLSDFEKAFAKRFGRSFQYMQYGFLSMFEVLNAASDVISVEQTRAGSLLMLKKSVTEEKPRGCPAGKIFTQPFRMKQGSYSTGFPVAKPCFSQPTSNMEPPKQIMSMEKTSKLNVVETSRLNHTEKLNQLENTFKSVIAQIGPGGTISSELKHKIKFVVSKFPEGLFISKLLGEYEVIFKEQLSPKKLGFLNVTELVGALSDILHVEFRKGHQDLLVFDADKKPLPPVQSDKKIEAKACVSSPPRNSLSTAAVKETVWNCPSKKQKEPQQKICKKPNLVVKPLQLQVETNKSELNLAMANHDIPPDAVPNKKLCRLPPLDTSSLIGVFVEYIISPSQFYIRIYSRDSSELLEDMMIEMRRCYSNQLVSDRYVMPECFIQPGHLCCVRISEDKWWYRVIIHRVLEKQEVEVFYPDFGNIGIVQKSSLRFLKCCYTKLPAQAIPCSLAWVRPVEEHWTSKAILQFQKLCGLKPLVGVVDEYVDGILNIFLCDTSSNEDVYFHHVLRTEGHAIVCRENISSKGFSELNPLALYTTSSGGPEDIVLTELGYPSQQHYFNEDRKISPQSKESELRILDEIPTGMPCLESVTIGDDIWDENWLPLQAKMGKGGDAASHLFTASLGGKNQYSSCKEMPQKDWCFSTPKDTWDDSWQPSGLVNGTKVEVHKPEVLGAQEKNTGTNRTQKQLDINGSSDSSTLPKLEEFCTSLTQSEQSADGSQSEPNNSQTQPKQIQLSTAAPCSTTAVDDSAEKPSGSVESSPEILKNEDFSSSRAITLYKDKRQESVDQLSLILSYECQISQKLYIPRSTATAALGAAARLATSRSLLHWYPSVKRMEA

SEQ ID NO: 1681 - DNA, 3673 bp, Homo sapiens
aatctctactcggcccgcaccagcagcgctggcgtcagggcgcggtgggggcaagacgggtgactggcagcagggcggtgccgggccgagaagggcgcctcacctggcgcctcctgccttcctttccacctcaggttgcagagagccgccagggcaggtggaagggccacgccccgctcccgtgagggtcaccgagagacgttgggggtggggcagggaccccaaccctagaccagtcctgtagggcacaatgtctgaacaagagcgtatacaggaatgtctgcggaaggaaataaggtcacttctcatttccaccaaagatggtttgagcccacaggagttggagaaggagtaccttttgatggttggcaaccatctaccactccgaatccttgggtatcggtccactatggagctggtattggacatgcctgatgttgttcgtgtctgccccggtgcaggtggtactgtaatactgaaagccattccagatgaatctaccaaaggaatagcaagcttagttgcaaaacagaggagcagccataagcttcgaaactcaatgcataagggaagacctagtatttattctggaccgagatctcatcggcgagtaccttaccgaggaagggttgcccctattcttccagctgttgtgaagagtgagttgaaggacctgttggcgttatctcctgttcttctttctgattttgaaaaggcatttgccaaaagatttggacgatcattccaatacatgcaatatggatttctctctatgtttgaagtgcttaatgcggcttcagatgtcatttctgtagagcagaccagagcaggttctttgttgatgctaaagaagagtgtaacagaggaaaagccgagaggatgtccagcaggtaaaatttttacccagccatttagaatgaaacaagggtcatactccacaggctttccggtagcaaagccatgcttttcacaacccacttcaaacatggaaccaccgaagcaaataatgagcatggaaaagacttccaagttaaatgtagtggagacttcaagactgaatcacactgaaaaattaaaccagctggagaacacattcaaatcagttattgcacagattggacctggaggaactatcagttcagaactaaaacataagataaaatttgttgtatctaagttcccagagggtttgtttatttctaaactgcttggagagtatgaggtaatttttaaagagcaactatcaccaaaaaaattaggcttcttaaatgtgacagaacttgttggagctcttagtgacattctccatgttgagttcaggacaccaagacttactagtgtttgatgcggataagaagcctctaccacctgttcagtcagataagaaaatagaagccaaagcttgtgtctccagtccacctagaaattcattgtctactgctgctgtcaaagagactgtatggaattgcccttcaaaaaaacaaaaagagccacaacagaagatttgcaagaagcctaatctggtggtaaagcctttacagctgcaagtagaaacaaacaaatcagagctcaacttggcaatggcaaatcatgacatcccgccagacgctgtgccgaacaagaaattatgcagactcccaccattagacaccagttccctcataggggtctttgtggagtatatcatctctcctagtcaattctacatccggatctatagcagggattcgtcagagttactcgaagacatgatgattgaaatgcggcgctgttattctaatcagctggtttctgatcgatatgtcatgccagaatgttttattcagccgggacatctctgttgtgtaaggatttctgaggataagtggtggtatcgggtcattatccatcgagtccttgagaaacaggaagttgaagtgttctacccagactttggaaatattggaattgttcagaagtcctccctgaggttcctcaagtgctgctacacaaagcttccagctcaggctatcccttgttctttggcttgggtgagaccagtagaggaacactggacatcgaaagctattttgcagttccagaagttgtgcggtttgaagccattagtgggggtagtggatgaatatgtagatggaatccttaacatttttttgtgtgacacatcctcaaacgaagatgtctatttccatcatgtcttgagaacagagggccatgctattgtatgccgagaaaatatctcttctaagggtttcagtgagctcaaccctttagctttatacacgacatccagtggagggccagaggacattgtcttgacagaactgggttatccttcccagcagcactattttaatgaagaccgaaagataagtccacagtcaaaagagagtgagttacgtatcttgcaagatattaatgatgaaaagtctttaagtcatcttaaatctgagtcaaaggagccattaaaggattctgaatttgagtctttgaaaacctgtaataagagctttgaagaagatccaaagtggtccaacccagaaccaaacgatctgaaggaagaaaatgaggatgagatccccactggaatgccatgcctggagtcagtgaccataggtgatgatatttgggatgagaactggttacctctacaggctaagatgggaaaaggaggtgatgctgcctcccatctatttactgcaagccttggtggaaagaatcagtattcatcatgtaaagaaatgccacagaaggactggtgtttttctacccctaaagatacatgggatgattcttggcagccttcaggccttgtaaatggaacgaaagtagaagttcataagccagaagtactgggtgctcaggaaaaaaatactggcacaaacaggactcaaaagcaactagacataaatggttcttcagattcttccacactgcccaaattggaagaattctgtacctctcttacccagtcagagcagtcagcagacgggagccagtctgaacccaacaacagtcagactcagccaaagcaaattcagctttccacagcagcaccctgttcaacaactgcagtggatgattccgcagaaaagccctctggttctgtggaaagctcaccagagatcctaaagaatgaagatttttctagcagccgtgctattacattgtacaaagacaagcgtcaagaatctgtagaccagctgtctttgattttgtcttatgagtgccagatttctcagaagctctacattcctcgaagtacagccactgctgccttaggtgctgccgcacggttagctacatccaggagcctcctacactggtaccccagtgtgaaaaggatggaagcatgagggagggagggaggagggagaaaaacagaatccagccgcttaggctttgatgaactcccaggccaaaatgaggagttattgaagcaaaatagtatcttgatcattgatacttttgtctttctgtgactatatgttagctttattatgctaacagtctactttgatgtgtaagtaagtattgatatttactgttaatcttgatttttcttgattttattctgtgtcattttgttcacctttgtttttaatgtagtttaaaggaatttgtttttttgtgtttgtttttcttgtacattatcatgactgataaatgaaaattg

SEQ ID NO: 1682 - protein, 681 aa, Homo sapiens
MLSSGHQDLLVFDADKKPLPPVQSDKKIEAKACVSSPPRNSLSTAAVKETVWNCPSKKQKEPQQKICKKPNLVVKPLQLQVETNKSELNLAMANHDIPPDAVPNKKLCRLPPLDTSSLIGVFVEYIISPSQFYIRIYSRDSSELLEDMMIEMRRCYSNQLVSDRYVMPECFIQPGHLCCVRISEDKWWYRVIIHRVLEKQEVEVFYPDFGNIGIVQKSSLRFLKCCYTKLPAQAIPCSLAWVRPVEEHWTSKAILQFQKLCGLKPLVGVVDEYVDGILNIFLCDTSSNEDVYFHHVLRTEGHAIVCRENISSKGFSELNPLALYTTSSGGPEDIVLTELGYPSQQHYFNEDRKISPQSKESELRILQDINDEKSLSHLKSESKEPLKDSEFESLKTCNKSFEEDPKWSNPEPNDLKEENEDEIPTGMPCLESVTIGDDIWDENWLPLQAKMGKGGDAASHLFTASLGGKNQYSSCKEMPQKDWCFSTPKDTWDDSWQPSGLVNGTKVEVHKPEVLGAQEKNTGTNRTQKQLDINGSSDSSTLPKLEEFCTSLTQSEQSADGSQSEPNNSQTQPKQIQLSTAAPCSTTAVDDSAEKPSGSVESSPEILKNEDFSSSRAITLYKDKRQESVDQLSLILSYECQISQKLYIPRSTATAALGAAARLATSRSLLHWYPSVKRMEA

SEQ ID NO: 1683 - DNA, 2192 bp, Homo sapiens
tagttccgtcgcagccgggatttgggtcgcagttcttgtttgtggatcgctgtgatcgtcacttgacaatgcagatcttcgtgaagactctgactggtaagaccatcaccctcgaggttgagcccagtgacaccatcgagaatgtcaaggcaaagatccaagataaggaaggcatccctcctgaccagcagaggctgatctttgctggaaaacagctggaagatgggcgcaccctgtctgactacaacatccagaaagagtccaccctgcacctggtgctccgtctcagaggtgggatgcaaatcttcgtgaagacactcactggcaagaccatcacccttgaggtcgagcccagtgacaccatcgagaacgtcaaagcaaagatccaggacaaggaaggcattcctcctgaccagcagaggttgatctttgccggaaagcagctggaagatgggcgcaccctgtctgactacaacatccagaaagagtctaccctgcacctggtgctccgtctcagaggtgggatgcagatcttcgtgaagaccctgactggtaagaccatcaccctcgaggtggagcccagtgacaccatcgagaatgtcaaggcaaagatccaagataaggaaggcattccttctgatcagcagaggttgatctttgccggaaaacagctggaagatggtcgtaccctgtctgactacaacatccagaaagagtccaccttgcacctggtactccgtctcagaggtgggatgcaaatcttcgtgaagacactcactggcaagaccatcacccttgaggtcgagcccagtgacactatcgagaacgtcaaagcaaagatccaagacaaggaaggcattcctcctgaccagcagaggttgatctttgccggaaagcagctggaagatgggcgcaccctgtctgactacaacatccagaaagagtctaccctgcacctggtgctccgtctcagaggtgggatgcagatcttcgtgaagaccctgactggtaagaccatcactctcgaagtggagccgagtgacaccattgagaatgtcaaggcaaagatccaagacaaggaaggcatccctcctgaccagcagaggttgatctttgccggaaaacagctggaagatggtcgtaccctgtctgactacaacatccagaaagagtccaccttgcacctggtgctccgtctcagaggtgggatgcagatcttcgtgaagaccctgactggtaagaccatcactctcgaggtggagccgagtgacaccattgagaatgtcaaggcaaagatccaagacaaggaaggcatccctcctgaccagcagaggttgatctttgctgggaaacagctggaagatggacgcaccctgtctgactacaacatccagaaagagtccaccctgcacctggtgctccgtcttagaggtgggatgcagatcttcgtgaagaccctgactggtaagaccatcactctcgaagtggagccgagtgacaccattgagaatgtcaaggcaaagatccaagacaaggaaggcatccctcctgaccagcagaggttgatctttgctgggaaacagctggaagatggacgcaccctgtctgactacaacatccagaaagagtccaccctgcacctggtgctccgtcttagaggtgggatgcagatcttcgtgaagaccctgactggtaagaccatcactctcgaagtggagccgagtgacaccattgagaatgtcaaggcaaagatccaagacaaggaaggcatccctcctgaccagcagaggttgatctttgctgggaaacagctggaagatggacgcaccctgtctgactacaacatccagaaagagtccaccctgcacctggtgctccgtctcagaggtgggatgcaaatcttcgtgaagaccctgactggtaagaccatcaccctcgaggtggagcccagtgacaccatcgagaatgtcaaggcaaagatccaagataaggaaggcatccctcctgatcagcagaggttgatctttgctgggaaacagctggaagatggacgcaccctgtctgactacaacatccagaaagagtccactctgcacttggtcctgcgcttgagggggggtgtctaagtttccccttttaaggtttcaacaaatttcattgcactttcctttcaataaagttgttgcattccc

SEQ ID NO: 1684 - protein, 685 aa, Homo sapiens
MQIFVKTLTGKTITLEVEPSDTIENVKAKIQDKEGIPPDQQRLIFAGKQLEDGRTLSDYNIQKESTLHLVLRLRGGMQIFVKTLTGKTITLEVEPSDTIENVKAKIQDKEGIPPDQQRLIFAGKQLEDGRTLSDYNIQKESTLHLVLRLRGGMQIFVKTLTGKTITLEVEPSDTIENVKAKIQDKEGIPSDQQRLIFAGKQLEDGRTLSDYNIQKESTLHLVLRLRGGMQIFVKTLTGKTITLEVEPSDTIENVKAKIQDKEGIPPDQQRLIFAGKQLEDGRTLSDYNIQKESTLHLVLRLRGGMQIFVKTLTGKTITLEVEPSDTIENVKAKIQDKEGIPPDQQRLIFAGKQLEDGRTLSDYNIQKESTLHLVLRLRGGMQIFVKTLTGKTITLEVEPSDTIENVKAKIQDKEGIPPDQQRLIFAGKQLEDGRTLSDYNIQKESTLHLVLRLRGGMQIFVKTLTGKTITLEVEPSDTIENVKAKIQDKEGIPPDQQRLIFAGKQLEDGRTLSDYNIQKESTLHLVLRLRGGMQIFVKTLTGKTITLEVEPSDTIENVKAKIQDKEGIPPDQQRLIFAGKQLEDGRTLSDYNIQKESTLHLVLRLRGGMQIFVKTLTGKTITLEVEPSDTIENVKAKIQDKEGIPPDQQRLIFAGKQLEDGRTLSDYNIQKESTLHLVLRLRGGV

SEQ ID NO: 1685 - DNA, 3520 bp, Homo sapiens
tggttccatatgaactttattttctcttggcccagaagagcttggtttgtttgaagataaggataaacccgatgcaaaggttcgaatcatccctttacagttacagcgcttgtttgctcagcttctgctcttagaccaggaagctgcatccacagcagacctcactgacagctttgggtggaccagtaatgaggaaatgaggcaacatgatgtgcaggaactgaatcgaatcctcttcagcgctttggaaacttctttagttgggacctccggtcatgacctcatctatcgtctgtaccatggaaccattgttaaccagattgtttgtaaagaatgtaagaacgttagcgagaggcaggaagacttcttagatctaacagtagcagtcaaaaatgtatccggtttggaagatgctctctggaacatgtatgtagaagaggaagtttttgattgtgacaacttgtaccactgtggaacttgtgacaggctggttaaagcagcaaagtcggccaaattacgtaagctgcctccttttcttactgtttcattactaagatttaattttgattttgtgaaatgcgaacgctacaaggaaactagctgttatacattccctctccggattaatctcaagcccttttgtgaacagagtgaattggatgacttagaatatatatatgacctcttctcagttattatacacaaaggtggctgctacggaggccattaccatgtatatattaaagatgttgatcatttgggaaactggcagtttcaagaggaaaaaagtaaaccagatgtgaatctgaaagatctccagagtgaagaagagattgatcatccactgatgattctaaaagcaatcttattagaggagaataatctaattcctgttgatcagctgggccagaaacttttgaaaaagataggaatatcttggaacaagaagtacagaaaacagcatggaccactgcggaagttcttacagctccattctcagatatttctactcagttcagatgaaagtacagttcgtctcttgaagaatagttctctccaggctgagtctgatttccaaaggaatgaccagcaaattttcaagatgcttcctccagaatccccaggtttaaacaatagcatctcctgtccccactggtttgatataaatgattctaaagtccagccaatcagggaaaaggatattgaacagcaatttcagggtaaagaaagtgcctacatgttgttttatcggaaatcccagttgcagagaccccctgaagctcgagctaatccaagatatggggttccatgtcatttactgaatgaaatggatgcagctaacattgaactgcaaaccaaaagggcagaatgtgattctgcaaacaatacttttgaattgcatcttcacctgggccctcagtatcatttcttcaatggggctctgcacccagtagtctctcaaacagaaagcgtgtgggatttgacctttgataaaagaaaaactttaggagatctccggcagtcaatatttcagctgttagaattttgggaaggagacatggttcttagtgttgcaaagcttgtaccagcaggacttcacatttaccagtcacttggcggggatgaactgacactgtgtgaaactgaaattgctgatggggaagacatctttgtgtggaatggggtggaggttggtggagtccacattcaaactggtattgactgcgaacctctacttttaaatgttcttcatctagacacaagcagtgatggagaaaagtgttgtcaggtgatagaatctccacatgtctttccagctaatgcagaagtgggcactgtcctcacagccttagcaatcccagcaggtgtcatcttcatcaacagtgctggatgtccaggtggggagggttggacggccatccccaaggaagacatgaggaagacgttcagggagcaagggctcagaaatggaagctcaattttaattcaggattctcatgatgataacagcttgttgaccaaggaagagaaatgggtcactagtatgaatgagattgactggctccacgttaaaaatttatgccagttagaatctgaagagaagcaagttaaaatatcagcaactgttaacacaatggtgtttgatattcgaattaaagccataaaggaattaaaattaatgaaggaactagctgacaacagctgtttgagacctattgatagaaatgggaagcttctttgtccagtgccggacagctatactttgaaggaagcagaattgaagatgggaagttcattgggactgtgtcttggaaaagcaccaagttcgtctcagttgttcctgttttttgcaatggggagtgacgttcaacctgggacagaaatggaaatcgtagtagaagaaacaatatctgtgagagattgtttaaagttaatgctgaagaaatctggcctacaaggagatgcctggcatttacgaaaaatggattggtgctatgaagctggagagcctttatgtgaagaagatgcaacactgaaagaacttctgatatgttctggagatactttgcttttaattgaaggacaacttcctcctctgggtttcctgaaggtgcccatctggtggtaccagcttcagggtccctcaggacactgggagagtcatcaggaccagaccaactgtacttcgtcttggggcagagtttggagagccacttccagccaaggtgcttctgggaacgagcctgcgcaagtttctctcctctacttgggagacatagagatctcagaagatgccacgctggcggagctgaagtctcaggccatgaccttgcctcctttcctggagttcggtgtcccgtccccagcccacctcagagcctggacggtggagaggaagcgcccaggcaggcttttacgaactgaccggcagccactcagggaatataaactaggacggagaattgagatctgcttagagccccttcagaaaggcgaaaacttgggcccccaggacgtgctgctgaggacacaggtgcgcatccctggtgagaggacctatgcccctgccctggacctggtgtggaacgcggcccagggtgggactgccggctccctgaggcagagagttgccgatttctatcgtcttcccgtggagaagattgaaattgccaaatactttcccgaaaagttcgagtggcttccgatatctagctggaaccaacaaataaccaagaggaaaaagaaaaaaaaacaagattatttgcaaggggcaccgtattacttgaaagacggagatactattggtgttaagaatctcctgattgacgacgatgatgatttcagtacaatcagagatgacactggaaaagaaaagcagaaacaacgggccctggggagaaggaaaagccaagaagccctccatgagcagagcagctacatcctctccagtgcagagacgcctgcccggccccgagccccggaaacttctctctccatccacgtggggagcttcagataa

SEQ ID NO: 1686 - protein, 1167 aa, Homo sapiens
LFSLGPEELGLFEDKDKPDAKVRIIPLQLQRLFAQLLLLDQEAASTADLTDSFGWTSNEEMRQHDVQELNRILFSALETSLVGTSGHDLIYRLYHGTIVNQIVCKECKNVSERQEDFLDLTVAVKNVSGLEDALWNMYVEEEVFDCDNLYHCGTCDRLVKAAKSAKLRKLPPFLTVSLLRFNFDFVKCERYKETSCYTFPLRINLKPFCEQSELDDLEYIYDLFSVIIHKGGCYGGHYHVYIKDVDHLGNWQFQEEKSKPDVNLKDLQSEEEIDHPLMILKAILLEENNLIPVDQLGQKLLKKIGISWNKKYRKQHGPLRKFLQLHSQIFLLSSDESTVRLLKNSSLQAESDFQRNDQQIFKMLPPESPGLNNSISCPHWFDINDSKVQPIREKDIEQQFQGKESAYMLFYRKSQLQRPPEARANPRYGVPCHLLNEMDAANIELQTKRAECDSANNTFELHLHLGPQYHFFNGALHPVVSQTESVWDLTFDKRKTLGDLRQSIFQLLEFWEGDMVLSVAKLVPAGLHIYQSLGGDELTLCETEIADGEDIFVWNGVEVGGVHIQTGIDCEPLLLNVLHLDTSSDGEKCCQVIESPHVFPANAEVGTVLTALAIPAGVIFINSAGCPGGEGWTAIPKEDMRKTFREQGLRNGSSILIQDSHDDNSLLTKEEKWVTSMNEIDWLHVKNLCQLESEEKQVKISATVNTMVFDIRIKAIKELKLMKELADNSCLRPIDRNGKLLCPVPDSYTLKEAELKMGSSLGLCLGKAPSSSQLFLFFAMGSDVQPGTEMEIVVEETISVRDCLKLMLKKSGLQGDAWHLRKMDWCYEAGEPLCEEDATLKELLICSGDTLLLIEGQLPPLGFLKVPIWWYQLQGPSGHWESHQDQTNCTSSWGRVWRATSSQGASGNEPAQVSLLYLGDIEISEDATLAELKSQAMTLPPFLEFGVPSPAHLRAWTVERKRPGRLLRTDRQPLREYKLGRRIEICLEPLQKGENLGPQDVLLRTQVRIPGERTYAPALDLVWNAAQGGTAGSLRQRVADFYRLPVEKIEIAKYFPEKFEWLPISSWNQQITKRKKKKKQDYLQGAPYYLKDGDTIGVKNLLIDDDDDFSTIRDDTGKEKQKQRALGRRKSQEALHEQSSYILSSAETPARPRAPETSLSIHVGSFR

SEQ ID NO: 1687 - DNA, 5149 bp, Homo sapiens
gaattcgctgcgtttccatgaaatcctgcggagtgtcgctcgctaccgccgccgctgccgccgccgctttcggtgatgaggaaaagaaaatggcggcgggaaaagcgagcggcgagagcgaggaggcgtcccccagcctgacagccgaggagagggaggcgctcggcggactggacagccgcctctttgggttcgtgagatttcatgaagatggcgccaggacgaaggccctactgggcaaggctgttcgctgctatgaatctctaatcttaaaagctgaaggaaaagtggagtctgatttcttttgtcaattaggtcacttcaacctcttattggaagattatccaaaagcattatctgcataccagaggtactacagtttacagtctgactactggaagaatgctgcctttttatatggtcttggtttggtctacttccattataatgcatttcagtgggcaattaaagcatttcaggaggtgctttatgttgatcccagcttttgtcgagccaaggaaattcatttacgacttgggcttatgttcaaagtgaacacagactatgagtctagtttaaagcattttcagttagctttggttgactgtaatccctgcactttgtccaatgctgaaattcaatttcacattgcccacttatatgaaacccagaggaaatatcattctgcaaaagaagcttatgaacaacttttgcagacagagaatctttctgcacaagtaaaagcaactgtcttacaacagttaggttggatgcatcacactgtagatctcctgggagataaagccaccaaggaaagctatgctattcagtatctccaaaagtccttggaagcagatcctaattctggccagtcctggtatttcctcggaaggtgctattcaagtattgggaaagttcaggatgcctttatatcttacaggcagtctattgataaatcagaagcaagtgcagatacatggtgttcaataggtgtgctatatcagcagcaaaatcagcccatggatgctttacaggcctatatttgtgctgtacaattggaccatggccatgctgcagcctggatggacctaggcactctctatgaatcctgcaaccagcctcaggatgccattaaatgctacttaaatgcaactagaagcaaaagttgtagtaatacctctgcacttgcagcacgaattaagtatttacaggctcagttgtgtaaccttccacaaggtagtctacagaataaaactaaattacttcctagtattgaggaggcgtggagcctaccaattcccgcagagcttacctccaggcagggtgccatgaacacagcacagcagaatacttctgacaattggagtggtggacatgctgtgtcacatcctccagtacagcaacaagctcattcatggtgtttgacaccacagaaattacagcatttggaacagctccgcgcaaatagaaataatttaaatccagcacagaaactgatgctggaacagctggaaagtcagtttgtcttaatgcaacaacaccaaatgagaccaacaggagttgcacaggtacgatctactggaattcctaatgggccaacagctgactcatcactgcctacaaactcagtctctggccagcagccacagcttgctctgaccagagtgcctagcgtctctcagcctggagtccgtcctgcctgccctgggcagcctttggccaatggacccttttctgcaggccatgttccctgtagcacatcaagaacgctgggaagtacagacactattttgataggcaataatcatataacaggaagtggaagtaatggaaacgtgccttacctgcagcgaaacgcactcactctacctcataaccgcacaaacctgaccagcagcgcagaggagccgtggaaaaaccaactatctaactccactcaggggcttcacaaaggtcagagttcacattcggcaggtcctaatggtgaacgacctctctcttccactgggccttcccagcatctccaggcagctggctctggtattcagaatcagaacggacatcccaccctgcctagcaattcagtaacacagggggctgctctcaatcacctctcctctcacactgctacctcaggtggacaacaaggcattaccttaaccaaagagagcaagccttcaggaaacatattgacggtgcctgaaacaagcaggcacactggagagacacctaacagcactgccagtgtcgagggacttcctaatcatgtccatcagatgacggcagatgctgtttgcagtcctagccatggagattctaagtcaccaggtttactaagttcagacaatcctcagctctctgccttgttgatgggaaaagccaataacaatgtgggtactggaacctgtgacaaagtcaataacatccacccagctgttcatacaaagactgataactctgttgcctcttcaccatcttcagccatttcaacagcaacaccttctccaaaatccactgagcagacaaccacaaacagtgttaccagccttaacagccctcacagtgggctacacacaattaatggagaagggatggaagaatctcagagccccatgaaaacagatctgcttctggttaaccacaaacctagtccacagatcataccatcaatgtctgtgtccatataccccagctcagcagaagttctgaaggcatgcaggaatctaggtaaaaatggcttatctaacagtagcattttgttggataaatgtccacctccaagaccaccatcttcaccataccctcccttgccaaaggacaagttgaatccacctacacctagtatttacttggaaaataaacgtgatgctttctttcctccattacatcaattttgtacaaatccgaacaaccctgttacagtaatacgtggccttgctggagctcttaagttagacctgggacttttctctactaaaactttggtggaagctaacaatgaacatatggtagaagtgaggacacagttgttgcagccagcagatgaaaactgggatcccactggaacaaagaaaatctggcattgtgaaagtaatagatctcatactacaattgctaaatatgcacagtaccaggcctcctcattccaggaatcattgagagaagaaaatgaaaaaagaagtcatcataaagaccactcagatagtgaatctacatcgtcagataattctgggaggaggaggaaaggaccctttaaaaccataaagtttgggaccaatattgacctatctgatgacaaaaagtggaagttgcagctacatgagctgactaaacttcctgcttttgtgcgtgtcgtatcagcaggaaatcttctaagccatgttggtcataccatattgggcatgaacacagttcaactatacatgaaagttccagggagcagaacaccaggtcatcaggaaaataacaacttctgttcagttaacataaatattggcccaggtgactgtgaatggtttgttgttcctgaaggttactggggtgttctgaatgacttctgtgaaaaaaataatttgaatttcctaatgggttcttggtggcccaatcttgaagatctttatgaagcaaatgttccagtgtataggtttattcagcgacctggagatttggtctggataaatgcaggcactgttcattgggttcaggctattggctggtgcaacaacattgcttggaatgttggtccacttacagcctgccagtataaattggcagtggaacggtacgaatggaacaaattgcaaagtgtgaagtcaatagtacccatggttcatctttcctggaatatggcacgaaatatcaaggtctcagatccaaagctttttgaaatgattaagtattgtcttctaagaactctgaagcaatgtcagacattgagggaagctctcattgctgcaggaaaagagattatatggcatgggcggacaaaagaagaaccagctcattactgtagcatttgtgaagtggaggtttttgatctgctttttgtcactaatgagagtaattcacgaaagacctacatagtacattgccaagattgtgcacgaaaaacaagcggaaacttggaaaactttgtggtgctagaacagtacaaaatggaggacctgatgcaagtctatgaccaatttacattagctcctccattaccatccgcctcatcttgatattgttccatggacattaaatgagaccttttctgctattcaggaaataacccagttctgcaccactggtttttgtagctatctcgtaaggctgctggctgaaaactgtgtctatgcaaccttccaagtgcggagtgtcaaccaactggacgggagagagtactgctcctactccaggactctcacaaagctgatgagctgtacttcagaaaaaaataataatttccatgttttgtatatatctgacaaaactggcaacatcttacagactactgacttgaagacaacctcttttatatttctctatttctgggctgatgaatttgttttcatctgtcttttcccccttcagaattttccttggaaaaaaaatactagcctagctggtcatttctttgtaaggtagttagcaattttaagtctttctttggtcaacttttttttaatgtgaaaagttaggtaagacacttttttactgcttttatgtttttctgtcttgttttgagaccatgatggttacacttttggttcctaaataaaatttaaaaaattaacagccaagtcacaaaggtaatggattgcacatagactaaggaataaacttcagatttgtgatttttgtttctaatcttgatgtaaatttacactatttataaatacatatttattgcttgaaaatatttgtgaatggaatgctgttattttttccagatttacctgccattgaaattttaaggagttctgtaatttcaaacactactcctattacattttctatgtgtaaataaaactgcttagcattgtacagaaacttttattaaaattgtttaatgtttaaagagttttctattgtttgagttttaaaaaagactttatgtacagtgcccagtttttgttcattttaaaccaggaataaatatatttat

SEQ ID NO: 1688 - protein, 1401 aa, Homo sapiens
MKSCGVSLATAAAAAAAFGDEEKKMAAGKASGESEEASPSLTAEEREALGGLDSRLFGFVRFHEDGARTKALLGKAVRCYESLILKAEGKVESDFFCQLGHFNLLLEDYPKALSAYQRYYSLQSDYWKNAAFLYGLGLVYFHYNAFQWAIKAFQEVLYVDPSFCRAKEIHLRLGLMFKVNTDYESSLKHFQLALVDCNPCTLSNAEIQFHIAHLYETQRKYHSAKEAYEQLLQTENLSAQVKATVLQQLGWMHHTVDLLGDKATKESYAIQYLQKSLEADPNSGQSWYFLGRCYSSIGKVQDAFISYRQSIDKSEASADTWCSIGVLYQQQNQPMDALQAYICAVQLDHGHAAAWMDLGTLYESCNQPQDAIKCYLNATRSKSCSNTSALAARIKYLQAQLCNLPQGSLQNKTKLLPSIEEAWSLPIPAELTSRQGAMNTAQQNTSDNWSGGHAVSHPPVQQQAHSWCLTPQKLQHLEQLRANRNNLNPAQKLMLEQLESQFVLMQQHQMRPTGVAQVRSTGIPNGPTADSSLPTNSVSGQQPQLALTRVPSVSQPGVRPACPGQPLANGPFSAGHVPCSTSRTLGSTDTILIGNNHITGSGSNGNVPYLQRNALTLPHNRTNLTSSAEEPWKNQLSNSTQGLHKGQSSHSAGPNGERPLSSTGPSQHLQAAGSGIQNQNGHPTLPSNSVTQGAALNHLSSHTATSGGQQGITLTKESKPSGNILTVPETSRHTGETPNSTASVEGLPNHVHQMTADAVCSPSHGDSKSPGLLSSDNPQLSALLMGKANNNVGTGTCDKVNNIHPAVHTKTDNSVASSPSSAISTATPSPKSTEQTTTNSVTSLNSPHSGLHTINGEGMEESQSPMKTDLLLVNHKPSPQIIPSMSVSIYPSSAEVLKACRNLGKNGLSNSSILLDKCPPPRPPSSPYPPLPKDKLNPPTPSIYLENKRDAFFPPLHQFCTNPNNPVTVIRGLAGALKLDLGLFSTKTLVEANNEHMVEVRTQLLQPADENWDPTGTKKIWHCESNRSHTTIAKYAQYQASSFQESLREENEKRSHHKDHSDSESTSSDNSGRRRKGPFKTIKFGTNIDLSDDKKWKLQLHELTKLPAFVRVVSAGNLLSHVGHTILGMNTVQLYMKVPGSRTPGHQENNNFCSVNINIGPGDCEWFVVPEGYWGVLNDFCEKNNLNFLMGSWWPNLEDLYEANVPVYRFIQRPGDLVWINAGTVHWVQAIGWCNNIAWNVGPLTACQYKLAVERYEWNKLQSVKSIVPMVHLSWNMARNIKVSDPKLFEMIKYCLLRTLKQCQTLREALIAAGKEIIWHGRTKEEPAHYCSICEVEVFDLLFVTNESNSRKTYIVHCQDCARKTSGNLENFVVLEQYKMEDLMQVYDQFTLAPPLPSASS

SEQ ID NO: 1689 - DNA, 3945 bp, Homo sapiens
tattgaggaggcgtggagcctaccaattcccgcagagcttacctccaggcagggtgccatgaacacagcacagcaggcatgtaaacctcatcatccaaatactgaacctgtattaggcctcagtcaaacaccaatttcacagcaatccttgccactacacatgattccttctagccaagtagatgacctgtccagtcctgccaagaggaaaagaacatctagtccaacaaagaatacttctgacaattggagtggtggacatgctgtgtcacatcctccagtacagcaacaagctcattcatggtgtttgacaccacagaaattacagcatttggaacagctccgcgcaaatagaaataatttaaatccagcacagaaactgatgctggaacagctggaaagtcagtttgtcttaatgcaacaacaccaaatgagaccaacaggagttgcacaggtacgatctactggaattcctaatgggccaacagctgactcatcactgcctacaaactcagtctctggccagcagccacagcttgctctgaccagagtgcctagcgtctctcagcctggagtccgtcctgcctgccctgggcagcctttggccaatggacccttttctgcaggccatgttccctgtagcacatcaagaacgctgggaagtacagacactattttgataggcaataatcatataacaggaagtggaagtaatggaaacgtgccttacctgcagcgaaacgcactcactctacctcataaccgcacaaacctgaccagcagcgcagaggagccgtggaaaaaccaactatctaactccactcaggggcttcacaaaggtcagagttcacattcggcaggtcctaatggtgaacgacctctctcttccactgggccttcccagcatctccaggcagctggctctggtattcagaatcagaacggacatcccaccctgcctagcaattcagtaacacagggggctgctctcaatcacctctcctctcacactgctacctcaggtggacaacaaggcattaccttaaccaaagagagcaagccttcaggaaacatattgacggtgcctgaaacaagcaggcacactggagagacacctaacagcactgccagtgtcgagggacttcctaatcatgtccatcagatgacggcagatgctgtttgcagtcctagccatggagattctaagtcaccaggtttactaagttcagacaatcctcagctctctgccttgttgatgggaaaagccaataacaatgtgggtactggaacctgtgacaaagtcaataacatccacccagctgttcatacaaagactgataactctgttgcctcttcaccatcttcagccatttcaacagcaacaccttctccaaaatccactgagcagacaaccacaaacagtgttaccagccttaacagccctcacagtgggctacacacaattaatggagaagggatggaagaatctcagagccccatgaaaacagatctgcttctggttaaccacaaacctagtccacagatcataccatcaatgtctgtgtccatataccccagctcagcagaagttctgaaggcatgcaggaatctaggtaaaaatggcttatctaacagtagcattttgttggataaatgtccacctccaagaccaccatcttcaccataccctcccttgccaaaggacaagttgaatccacctacacctagtatttacttggaaaataaacgtgatgctttctttcctccattacatcaattttgtacaaatccgaacaaccctgttacagtaatacgtggccttgctggagctcttaagttagacctgggacttttctctactaaaactttggtggaagctaacaatgaacatatggtagaagtgaggacacagttgttgcagccagcagatgaaaactgggatcccactggaacaaagaaaatctggcattgtgaaagtaatagatctcatactacaattgctaaatatgcacagtaccaggcctcctcattccaggaatcattgagagaagaaaatgaaaaaagaagtcatcataaagaccactcagatagtgaatctacatcgtcagataattctgggaggaggaggaaaggaccctttaaaaccataaagtttgggaccaatattgacctatctgatgacaaaaagtggaagttgcagctacatgagctgactaaacttcctgcttttgtgcgtgtcgtatcagcaggaaatcttctaagccatgttggtcataccatattgggcatgaacacagttcaactatacatgaaagttccagggagcagaacaccaggtcatcaggaaaataacaacttctgttcagttaacataaatattggcccaggtgactgtgaatggtttgttgttcctgaaggttactggggtgttctgaatgacttctgtgaaaaaaataatttgaatttcctaatgggttcttggtggcccaatcttgaagatctttatgaagcaaatgttccagtgtataggtttattcagcgacctggagatttggtctggataaatgcaggcactgttcattgggttcaggctattggctggtgcaacaacattgcttggaatgttggtccacttacagcctgccagtataaattggcagtggaacggtacgaatggaacaaattgcaaagtgtgaagtcaatagtacccatggttcatctttcctggaatatggcacgaaatatcaaggtctcagatccaaagctttttgaaatgattaagtattgtcttctaagaactctgaagcaatgtcagacattgagggaagctctcattgctgcaggaaaagagattatatggcatgggcggacaaaagaagaaccagctcattactgtagcatttgtgaagtggaggtttttgatctgctttttgtcactaatgagagtaattcacgaaagacctacatagtacattgccaagattgtgcacgaaaaacaagcggaaacttggaaaactttgtggtgctagaacagtacaaaatggaggacctgatgcaagtctatgaccaatttacattagctcctccattaccatccgcctcatcttgatattgttccatggacattaaatgagaccttttctgctattcaggaaataacccagttctgcaccactggtttttgtagctatctcgtaaggctgctggctgaaaactgtgtctatgcaaccttccaagtgcggagtgtcaaccaactggacgggagagagtactgctcctactccaggactctcacaaagctgatgagctgtacttcagaaaaaaataataatttccatgttttgtatatatctgacaaaactggcaacatcttacagactactgacttgaagacaacctcttttatatttctctatttctgggctgatgaatttgttttcatctgtcttttcccccttcagaattttccttggaaaaaaaatactagcctagctggtcatttctttgtaaggtagttagcaattttaagtctttctttggtcaacttttttttaatgtgaaaagttaggtaagacacttttttactgcttttatgtttttctgtcttgttttgagaccatgatggttacacttttggttcctaaataaaatttaaaaaattaacagccaagtcacaaaggtaatggattgcacatagactaaggaataaacttcagatttgtgatttttgtttctaatcttgatgtaaatttacactatttataaatacatatttattgcttgaaaatatttgtgaatggaatgctgttattttttccagatttacctgccattgaaattttaaggagttctgtaatttcaaacactactcctattacattttctatgtgtaaataaaactgcttagcattgtacagaaacttttattaaaattgtttaatgttt

SEQ ID NO: 1690 - protein, 1035 aa, Homo sapiens
IEEAWSLPIPAELTSRQGAMNTAQQACKPHHPNTEPVLGLSQTPISQQSLPLHMIPSSQVDDLSSPAKRKRTSSPTKNTSDNWSGGHAVSHPPVQQQAHSWCLTPQKLQHLEQLRANRNNLNPAQKLMLEQLESQFVLMQQHQMRPTGVAQVRSTGIPNGPTADSSLPTNSVSGQQPQLALTRVPSVSQPGVRPACPGQPLANGPFSAGHVPCSTSRTLGSTDTILIGNNHITGSGSNGNVPYLQRNALTLPHNRTNLTSSAEEPWKNQLSNSTQGLHKGQSSHSAGPNGERPLSSTGPSQHLQAAGSGIQNQNGHPTLPSNSVTQGAALNHLSSHTATSGGQQGITLTKESKPSGNILTVPETSRHTGETPNSTASVEGLPNHVHQMTADAVCSPSHGDSKSPGLLSSDNPQLSALLMGKANNNVGTGTCDKVNNIHPAVHTKTDNSVASSPSSAISTATPSPKSTEQTTTNSVTSLNSPHSGLHTINGEGMEESQSPMKTDLLLVNHKPSPQIIPSMSVSIYPSSAEVLKACRNLGKNGLSNSSILLDKCPPPRPPSSPYPPLPKDKLNPPTPSIYLENKRDAFFPPLHQFCTNPNNPVTVIRGLAGALKLDLGLFSTKTLVEANNEHMVEVRTQLLQPADENWDPTGTKKIWHCESNRSHTTIAKYAQYQASSFQESLREENEKRSHHKDHSDSESTSSDNSGRRRKGPFKTIKFGTNIDLSDDKKWKLQLHELTKLPAFVRVVSAGNLLSHVGHTILGMNTVQLYMKVPGSRTPGHQENNNFCSVNINIGPGDCEWFVVPEGYWGVLNDFCEKNNLNFLMGSWWPNLEDLYEANVPVYRFIQRPGDLVWINAGTVHWVQAIGWCNNIAWNVGPLTACQYKLAVERYEWNKLQSVKSIVPMVHLSWNMARNIKVSDPKLFEMIKYCLLRTLKQCQTLREALIAAGKEIIWHGRTKEEPAHYCSICEVEVFDLLFVTNESNSRKTYIVHCQDCARKTSGNLENFVVLEQYKMEDLMQVYDQFTLAPPLPSASS

SEQ ID NO: 1691 - DNA, 4422 bp, Homo sapiens
gcactccgcagcctttaaggttcgcgcgggggccaggcaagagttagccatgaagagcctcaagtcccgcctgaggaggcaggacgtgcccggccccgcgtcgtctggcgccgccgccgccagcgcgcatgcagcagattggaataaatatgatgaccgattgatgaaagcagcagaaaggggggatgtagaaaaagtgacctcaatccttgctaaaaagggggtcaatccaggcaaactagatgtggaaggcagatctgtcttccatgttgtgacctcaaaggggaatcttgagtgtttgaatgccatccttatacatggagttgatattacaaccagtgacactgcagggagaaatgctcttcacctggctgctaagtatggacatgcattgtgcctacaaaaacttctacagtacaattgtcccactgagcatgcagacctgcagggaagaactgcacttcacgatgccgcaatggcagattgtccttctagcatacagctgctttgtgaccatggggcctctgtgaatgccaaagatgtagacgggcggacaccacttgttctggctactcagatgagtaggccaacaatatgtcaactgctgatagatagaggagcggatgttaattccagagacaaacaaaacagaactgccctcatgctaggttgcgaatatggttgcagagatgcagtagaagtcttaattaaaaatggtgctgatataagcttgctggatgcgcttggccatgatagttcttactatgcaagaattggtgacaatctggacattctaaccttgttgaagactgcatcggaaaataccaacaaagggagagaactttggaagaaagggccatctttgcaacagcgaaatttgacacacatgcaagatgaagtaaatgtgaagtcacatcagagggagcatcaaaatattcaggatttggagattgaaaatgaagatttgaaagagaggttgagaaaaattcagcaagaacaaagaatacttttggataaagtcaatggtttacagttacagctgaatgaggaagttatggttgctgatgatctggaaagcgagagagaaaagctgaagtcccttttggcagctaaagaaaagcaacatgaagaaagcttaaggactattgaggctctgaaaaatagatttaaatattttgagagtgatcatttaggatcaggaagtcatttcagtaaccgaaaagaagatatgcttcttaaacaaggtcagatgtatatggcagactcacagtgtacttccccaggtataccagcccatatgcaaagcagatctatgttaagacctctggaactatctttacccagtcaaacgtcatactctgaaaatgaaattttaaagaaagagttagaagcaatgcgaactttctgtgagtcagcaaaacaagaccgactgaagctccaaaatgaactggcacacaaagtggcagaatgcaaagctttagcattagaatgtgaaagggtcaaggaggattcagatgaacagataaagcaattagaagatgcattaaaagatgtgcagaagaggatgtatgagtcagaaggtaaagttaaacaaatgcagacccattttcttgcccttaaagaacacttaacaagtgaagcagcctcagggaatcacagactaaccgaggaactgaaggatcagttgaaagacttgaaagtaaaatatgaaggtgcttcagcagaagtggggaaattaagaaaccaaatcaaacaaaatgagatgatagtagaagagtttaagagggatgaaggcaagctgatagaagaaaataagcgattacagaaggaacttagtatgtgtgaaatggagcgagagaagaaaggaagaaaggtcacagagatggaaggccaggcaaaagaattgtcagcgaagttggccctttccattccagctgaaaaatttgaaaacatgaagagctcattatcaaatgaagtgaatgagaaagcaaaaaaattagtagaaatggaaagagaacatgaaaaatcacttagtgaaattagacagttaaagagagaacttgagaatgttaaggccaagcttgctcagcacgtcaaaccagaggaacatgaacaggttaagagcagattagaacagaaatcaggagaacttgggaagaagatcactgagttaacattgaaaaatcagacactacaaaaggaaattgaaaaagtttatttggataataagctcctcaaggagcaagcacataacttaacaattgaaatgaaaaatcattatgttcctttaaaagtaagtgaagacatgaaaaagtcacatgatgcaattattgatgatcttaatagaaagcttttagatgtaacacaaaaatatacagaaaagaagttggaaatggagaaattgctactggaaaatgacagcttaagtaaggatgtaagccgcctagaaactgtgtttgtacctcctgagaaacatgaaaaagagataatagctctgaaatccaatattgttgaacttaagaaacagctgtctgaacttaagaaaaaatgtggtgaagaccaggagaaaatacacgctctcacatctgaaaacactaacttgaagaagatgatgagtaatcagtatgtgccagttaaaacccatgaagaggttaaaatgacactgaatgacacgttagccaaaactaacagagaattattagatgtgaagaaaaaatttgaagatataaatcaggaatttgtaaaaataaaagataagaatgaaatattaaaaagaaacctggaaaacactcagaaccaaataaaagctgagtacatcagcctggcagagcacgaggcaaagatgagctcgctaagtcagagcatgagaaaggtgcaggatagtaatgctgaaatcttggccaactacagaaaaggccaagaagagattgtgacactgcatgccgaaattaaagcccagaagaaggagctcgacacaatacaagaatgcattaaggtaaaatacgccccaattgtcagctttgaggagtgcgagagaaaatttaaagcaacagagaaagaactaaaagaccagttatcagagcagacacaaaagtatagtgtcagtgaagaagaagtcaagaaaaacaagcaagagaatgacaagttaaagaaggagatttttacccttcagaaagatttgagagataagacagttctcattgagaagtctcatgaaatggaaagagcattaagcagaaaaacagacgagctaaacaaacagttaaaagacttgtcacagaaatacacggaagtaaagaatgtgaaagagaagctagtagaagaaaatgccaaacagacttctgagatacttgcagtgcaaaatcttttgcaaaaacaacatgttccattggaacaggttgaggctctgaaaaaatctcttaatggcacaattgaaaatctaaaggaagaactgaagagtatgcaaaggtgttacgagaaagagcagcagacagtgaccaaactgcatcaattgttggagaatcaaaagaactcttctgtacccctggcagagcatttgcagattaaagaagcatttgagaaagaagttggaatcataaaagccagcttgagagaaaaggaagaagaaagccaaaacaaaatggaagaagtctccaaacttcagtcggaggttcagaatactaaacaagcattaaaaaaattagagactagagaggtagttgacttgtctaaatataaagcaacaaaaagtgatttggagacacagatttctagcttaaatgaaaaattggccaatctgaatagaaagtatgaggaagtatgtgaggaagttttgcatgccaaaaagaaggaaatatctgcaaaagatgagaaggaattactgcatttcagcattgagcaagaaattaaggatcagaaggaacgatgtgataagtccttaacaacaatcacagagttacaaagaagaatacaagaatctgctaaacaaatagaagcaaaagataataagataactgaactgcttaatgatgtggaaagattaaaacaggcactcaatggcctttcccaactcacctacacaagtgggaaccccaccaagaggcagagccagctgattgacactctgcagcaccaagtgaaatctctggagcaacagctggccgatgctgacagacagcaccaagaagtaattgcaatttatcggacacaccttcttagtgctgcacagggtcacatggatgaagatgttcaggaggctctgctccagatcatacaaatgcggcaggggcttgtgtgctagccgttagcactgactgccagtatctgttttatcttgctggtgctgaacattctttgtgcaactccatggtctttctgggccttactgtgctggtataattaaaataaaatatattttgttct

SEQ ID NO: 1692 - protein, 1416 aa, Homo sapiens
MKSLKSRLRRQDVPGPASSGAAAASAHAADWNKYDDRLMKAAERGDVEKVTSILAKKGVNPGKLDVEGRSVFHVVTSKGNLECLNAILIHGVDITTSDTAGRNALHLAAKYGHALCLQKLLQYNCPTEHADLQGRTALHDAAMADCPSSIQLLCDHGASVNAKDVDGRTPLVLATQMSRPTICQLLIDRGADVNSRDKQNRTALMLGCEYGCRDAVEVLIKNGADISLLDALGHDSSYYARIGDNLDILTLLKTASENTNKGRELWKKGPSLQQRNLTHMQDEVNVKSHQREHQNIQDLEIENEDLKERLRKIQQEQRILLDKVNGLQLQLNEEVMVADDLESEREKLKSLLAAKEKQHEESLRTIEALKNRFKYFESDHLGSGSHFSNRKEDMLLKQGQMYMADSQCTSPGIPAHMQSRSMLRPLELSLPSQTSYSENEILKKELEAMRTFCESAKQDRLKLQNELAHKVAECKALALECERVKEDSDEQIKQLEDALKDVQKRMYESEGKVKQMQTHFLALKEHLTSEAASGNHRLTEELKDQLKDLKVKYEGASAEVGKLRNQIKQNEMIVEEFKRDEGKLIEENKRLQKELSMCEMEREKKGRKVTEMEGQAKELSAKLALSIPAEKFENMKSSLSNEVNEKAKKLVEMEREHEKSLSEIRQLKRELENVKAKLAQHVKPEEHEQVKSRLEQKSGELGKKITELTLKNQTLQKEIEKVYLDNKLLKEQAHNLTIEMKNHYVPLKVSEDMKKSHDAIIDDLNRKLLDVTQKYTEKKLEMEKLLLENDSLSKDVSRLETVFVPPEKHEKEIIALKSNIVELKKQLSELKKKCGEDQEKIHALTSENTNLKKMMSNQYVPVKTHEEVKMTLNDTLAKTNRELLDVKKKFEDINQEFVKIKDKNEILKRNLENTQNQIKAEYISLAEHEAKMSSLSQSMRKVQDSNAEILANYRKGQEEIVTLHAEIKAQKKELDTIQECIKVKYAPIVSFEECERKFKATEKELKDQLSEQTQKYSVSEEEVKKNKQENDKLKKEIFTLQKDLRDKTVLIEKSHEMERALSRKTDELNKQLKDLSQKYTEVKNVKEKLVEENAKQTSEILAVQNLLQKQHVPLEQVEALKKSLNGTIENLKEELKSMQRCYEKEQQTVTKLHQLLENQKNSSVPLAEHLQIKEAFEKEVGIIKASLREKEEESQNKMEEVSKLQSEVQNTKQALKKLETREVVDLSKYKATKSDLETQISSLNEKLANLNRKYEEVCEEVLHAKKKEISAKDEKELLHFSIEQEIKDQKERCDKSLTTITELQRRIQESAKQIEAKDNKITELLNDVERLKQALNGLSQLTYTSGNPTKRQSQLIDTLQHQVKSLEQQLADADRQHQEVIAIYRTHLLSAAQGHMDEDVQEALLQIIQMRQGLVC

SEQ ID NO: 1693 - DNA, 2007 bp, Homo sapiens
ccaggccgggaggcgacgcgcccagccgtctaaacgggaacagccctggctgagggagctgcagcgcagcagagtatctgacggcgccaggttgcgtaggtgcggcacgaggagttttcccggcagcgaggaggtcctgagcagcatggcccggaggagcgccttccctgccgccgcgctctggctctggagcatcctcctgtgcctgctggcactgcgggcggaggccgggccgccgcaggaggagagcctgtacctatggatcgatgctcaccaggcaagagtactcataggatttgaagaagatatcctgattgtttcagaggggaaaatggcaccttttacacatgatttcagaaaagcacaacagagaatgccagctattcctgtcaatatccattccatgaattttacctggcaagctgcagggcaggcagaatacttctatgaattcctgtccttgcgctccctggataaaggcatcatggcagatccaaccgtcaatgtccctctgctgggaacagtgcctcacaaggcatcagttgttcaagttggtttcccatgtcttggaaaacaggatggggtggcagcatttgaagtggatgtgattgttatgaattctgaaggcaacaccattctccaaacacctcaaaatgctatcttctttaaaacatgtcaacaagctgagtgcccaggcgggtgccgaaatggaggcttttgtaatgaaagacgcatctgcgagtgtcctgatgggttccacggacctcactgtgagaaagccctttgtaccccacgatgtatgaatggtggactttgtgtgactcctggtttctgcatctgcccacctggattctatggagtgaactgtgacaaagcaaactgctcaaccacctgctttaatggagggacctgtttctaccctggaaaatgtatttgccctccaggactagagggagagcagtgtgaaatcagcaaatgcccacaaccctgtcgaaatggaggtaaatgcattggtaaaagcaaatgtaagtgttccaaaggttaccagggagacctctgttcaaagcctgtctgcgagcctggctgtggtgcacatggaacctgccatgaacccaacaaatgccaatgtcaagaaggttggcatggaagacactgcaataaaaggtacgaagccagcctcatacatgccctgaggccagcaggcgcccagctcaggcagcacacgccttcacttaaaaaggccgaggagcggcgggatccacctgaatccaattacatctggtgaactccgacatctgaaacgttttaagttacaccaagttcatagcctttgttaacctttcatgtgttgaatgttcaaataatgttcattacacttaagaatactggcctgaattttattagcttcattataaatcactgagctgatatttactcttccttttaagttttctaagtacgtctgtagcatgatggtatagattttcttgtttcagtgctttgggacagattttatattatgtcaattgatcaggttaaaattttcagtgtgtagttggcagatattttcaaaattacaatgcatttatggtgtctgggggcaggggaacatcagaaaggttaaattgggcaaaaatgcgtaagtcacaagaatttggatggtgcagttaatgttgaagttacagcatttcagattttattgtcagatatttagatgtttgttacatttttaaaaattgctcttaatttttaaactctcaatacaatatattttgaccttaccattattccagagattcagtattaaaaaaaaaaaaattacactgtggtagtggcatttaaacaatataatatattctaaacacaatgaaatagggaatataatgtatgaactttttgcattggcttgaagcaatataatatattgtaaacaaaacacagctcttacctaataaacattttatactgtttgtatgtataaaataaaggtgctgctttagttttctg

SEQ ID NO: 1694 - protein, 379 aa, Homo sapiens
MARRSAFPAAALWLWSILLCLLALRAEAGPPQEESLYLWIDAHQARVLIGFEEDILIVSEGKMAPFTHDFRKAQQRMPAIPVNIHSMNFTWQAAGQAEYFYEFLSLRSLDKGIMADPTVNVPLLGTVPHKASVVQVGFPCLGKQDGVAAFEVDVIVMNSEGNTILQTPQNAIFFKTCQQAECPGGCRNGGFCNERRICECPDGFHGPHCEKALCTPRCMNGGLCVTPGFCICPPGFYGVNCDKANCSTTCFNGGTCFYPGKCICPPGLEGEQCEISKCPQPCRNGGKCIGKSKCKCSKGYQGDLCSKPVCEPGCGAHGTCHEPNKCQCQEGWHGRHCNKRYEASLIHALRPAGAQLRQHTPSLKKAEERRDPPESNYIW

SEQ ID NO: 1695 - DNA, 1856 bp, Homo sapiens
tgcgttttgagtctcgggacccctgttggagagactatggcgctcaacaagaatcactcggagggcggcggagtgatcgtcaataacaccgagagcatcctaatgtcctatgatcacgtggaactcacattcaatgacatgaagaacgtgccagaagccttcaaagggaccaagaaaggcactgtctaccttaccccttaccgggtcatctttctgtccaagggcaaggatgccatgcagtccttcatgatgccattttatctcatgaaagactgtgagatcaagcagcccgtatttggtgcaaactacatcaagggaacagtgaaggcggaagcgggaggtggctgggaaggctctgcttcctacaagttgactttcacggcagggggcgccattgagttcggacagcggatgctccaggtggcatctcaagcctccagaggtgaagtccccagtggagcctatggctactcttacatgcccagcggggcctatgtctatcccccgccagtcgccaatggaatgtacccctgccctcctggctacccctatccaccgcccccacctgagttctatccaggaccccccatgatggacggggccatgggatacgtgcagcccccaccaccgccctaccctgggcccatggaacctccggtcagcggccccgatgtcccctccactcctgcagccgaagccaaggccgcagaagcagccgccagcgcctattacaacccaggcaatcctcacaacgtctacatgcccacgagccagccgccgccacctccctactacccaccggaagataagaagacccagtaggccctcctgcctccctgcctcccaccctcatctctctaccctacccctcccatcggggctgtgctggggcttggggaggggagggggcgccttgttctccctccaggtctgatcataaacaattaccaggaactagcattgtgggacattagggcccccggcctcgggagaggtgccgcccagcttcccatgccagcccggagcccacagtgctgcccagcgtacctccctcaccgtctggggctcttctgggagcacggagcatcccctgttcctgtttcactctcagcttctcccctcgaagggactctctggccacctcctccaccgcagtccagctccctcagtctggcacccactgctacactcagcctcatgagccacttcagaccagccaggtgtcttcccgggccctgccagaccctgctcacattccctctgctggtctgtgctggtctcagaaggccaccgcgcccgcattccactcagccagggtccagctgcagcccccgccacccttccttcccttccctgtcctgggtcatgttgttgccaccctgtgtgacttttgaagctgtaaaatgagcttccagggcttgggtggcgtcggggcagggccgccgaggctgggaggaagcccttctgccttttgctggtgtttctggaatttgctttccctcacctctcacttccttctagaaggagcttcctgactggaaccagagaatgcatgtctgtccacttggtggctgctgggtggggccgggaacaagggcccctgaccctgtgtgctggccgggacctgccaccagccccccagcctgcttcttccccttaagctttgtgcccctggatgcgctaacattcactcttgtttgtccctggactggccatgaagtgaggagatggttatttaaagagaattccctatttatttgacaaaaaatccagttaatatattaatgtgaaataaaccctgtttgcacctcgatttgtttgctgaaaatgtgaaatagtaaaaatgaaataactgg

SEQ ID NO: 1696 - protein, 261 aa, Homo sapiens
MALNKNHSEGGGVIVNNTESILMSYDHVELTFNDMKNVPEAFKGTKKGTVYLTPYRVIFLSKGKDAMQSFMMPFYLMKDCEIKQPVFGANYIKGTVKAEAGGGWEGSASYKLTFTAGGAIEFGQRMLQVASQASRGEVPSGAYGYSYMPSGAYVYPPPVANGMYPCPPGYPYPPPPPEFYPGPPMMDGAMGYVQPPPPPYPGPMEPPVSGPDVPSTPAAEAKAAEAAASAYYNPGNPHNVYMPTSQPPPPPYYPPEDKKTQ

SEQ ID NO: 1697 - DNA, 994 bp, Homo sapiens
atgcaacctgaggcctcctcactgagtcaaaaccgagacgcctctggtccccggagaggctgctggctctggaggagagagcagcccagtgtgacagagcgagtccccacggctctgggagtgcctcgcatgtgtgtggcccaggtcctgacagcccacctactccctccccggcaggcactgggctccctctgctccccgtgggccgctccccgcgtggggccactgcccccggcccccgccatggtgcggatttcaaagcccaagacgtttcaggcctacttggatgattgtcaccggaggtatagctgtgcccactgccgcgctcacctggccaaccacgacgacctcatctccaagtccttccagggcagtcaggggcgtgcctacctcttcaactcagtggtgaacgtgggctgcgggccagccgaggagcgggtgctgctgaccggcctccatgctgtcgccgacatccactgcgagaactgcaagaccactttgggctggaaatatgaacaggcctttgagagcagccagaagtacaaagaggggaagtacatcattgaactcaaccacatgatcaaagacaacggctgggactgacccccgctcccccgacgcatgtggctccagcccggcctggccgccagggagcgccactggcttcccgccacccgaagggagctctggaccctcagagcccctgcagaggacggatctagctcctgtatatatattttattgcatgcactgtgaccttggggggagaacagaagggggacgacgcccccgcacctcctgcgatctggctggcttggatctcgtttttaacccgttcctgccccacctgccctatagttatggcctgtgttctgctctcctggtcccagtgcaccgtctgctctgtgaactcctcccaccaggcccttcttaccccacgcgtgtctgtccccctcgttctgtagcgtttgtacataataaaacaatggagtgg

SEQ ID NO: 1698 - protein, 200 aa, Homo sapiens
MQPEASSLSQNRDASGPRRGCWLWRREQPSVTERVPTALGVPRMCVAQVLTAHLLPPRQALGSLCSPWAAPRVGPLPPAPAMVRISKPKTFQAYLDDCHRRYSCAHCRAHLANHDDLISKSFQGSQGRAYLFNSVVNVGCGPAEERVLLTGLHAVADIHCENCKTTLGWKYEQAFESSQKYKEGKYIIELNHMIKDNGWD

SEQ ID NO: 1699 - DNA, 2786 bp, Homo sapiens
gaaggagtggacccaacctggccgcgccgcagaagtggctcccgaggaagccggcgccggggccgccgcctcgtgtcccctcggggcgcagtgctcgggggtcggcgggccagagccgaggcgcggccggggagccgggggctgcggggccgagcgggcagccgcgcgagggggcgggcgctcggcgacccgggggccggccgggctgagccccgcgccccgggacgcgggctggaagcgacggaggagtgctgccgcgggctgcggaccagcgccgtcccctcacggagcggggattctgctatgacagttgggctccccggagggttaacctgggtgtcctcggcaaagttgtcgccgagccgggagcccgtgtaggggccgcggcgccgcggctcggggggcggccgggcggccggcggcggtcgtggctcggcggggcccgcgcggccggggggctcctgggggtgtgcgcccccagccggctgccctcgtggatgcctcccggcggcggcgggcccatgaaagactgcgagtacagccagatcagcacccacagctcctcccccatggagtcgccccacaagaagaagaaaatcgcggcccggaggaaatgggaggtgttcccgggaagaaacaagttcttctgtaacgggaggatcatgatggcccggcagacgggcgtcttctacctgacgctcgtcctcatcctggtcactagcggactcttcttcgccttcgactgtccgtacctggcggtgaaaatcacccctgccatccctgcagtcgctggcatcctgttcttctttgtgatggggaccctgctccgcaccagcttcagcgaccccggagtcctcccacgagccacgcctgatgaagccgccgatctggaaaggcaaatagatatcgcaaacggcaccagttcaggggggtaccgcccgcctcccagaaccaaagaagtcatcatcaatggccagaccgtgaaacttaaatactgtttcacctgcaagattttccggccccctcgcgcctcccattgcagcctttgtgataactgcgtagaacggtttgatcaccactgtccctgggtaggcaactgtgtggggaaaagaaactacagatttttttatatgtttattttatctctgtcttttctgacagtctttatatttgcattcgttatcacccacgtcattcttcgttcacagcaaacaggattcctaaatgcccttaaggacagtcctgcaagcgtcctggaggctgtggtgtgcttcttctctgtctggtccatcgttggcctctcaggattccacacctacttgatcagctccaaccagacaacaaatgaggacattaaaggatcctggtcaaataaaagaggtaaagaaaattacaatccctacagctacggaaatatctttaccaactgctgtgttgccctgtgtgggcccatctcaccaagcctgatcgacagaagagggtacatccagcccgacacgccgcagccagcagcaccctccaatggcatcaccatgtacggggccacgcagtcacagagtgacatgtgcgaccaagaccagtgcattcagagcaccaaattcgttttgcaggctgcagccacgcccctgctgcagagcgagcccagcctcaccagcgacgagctgcacctgcccgggaagcctggcctgggcacgccctgcgccagcctcacactgggcccgcccacaccgcccgcctccatgcccaacctcgccgaggccacgctcgcggacgtgatgccccggaaagatgagcacatgggccaccagttcctgacgcccgatgaggcgccctcgccccccaggctactggcggcgggcagccccctggcgcacagccgcaccatgcacgtgctgggcctggccagccaggactccctgcatgaggactctgtgcgcggcctggtgaagctcagctccgtgtgacccacatggccccaggccgggggacaccagaggctcctccatgggcagcaggagtgagcggaggggtgtgtcccacagcgactttcccagccaatgccacggtggagatgacagccccaggtctggggtacagagaccacttaggatggcacagggtggctggccccggatgctgagagcttggtttcatttgaattttcttccccaacctgagtgctttgacaacaatggaaatagagaagtggctgctttcttttggtgaccctccaggggtggaatcggagtgtgtctgcccgcccttgtgacagacacacggaaggcttctgacgcttgtggccagactgcaattgcacttatgtgttatgctactaatatttgaaacagacctgccattccatttgttaattaaaaaaaaaaaaaatcctaaagggaaaaaaccgaccaggtgtggatctgcatgccacgctgccgtctgtgttacagtggtgttgctatttccaaggaagtgctgctttctttttctttttttaattttgtgaattttcaagtgctgttttgttggaagacagtgcaacgaactgagactaatggacagtgtcatcactcagcttactgggctgaggcgtctgtggagaggtggcaccggggctgcagagggcggctggggttccgtcgtgtcgggtgtcacttcaccttctgtttggccgctcgatgaggtctcgtgttgagatattgtgtgccacaacccccacagtcttcacctccgtgtgtgatgaaacttcccgtggacagccaataaaatgacgtcctctgttattttgg

SEQ ID NO: 1700 - protein, 488 aa, Homo sapiens
MPPGGGGPMKDCEYSQISTHSSSPMESPHKKKKIAARRKWEVFPGRNKFFCNGRIMMARQTGVFYLTLVLILVTSGLFFAFDCPYLAVKITPAIPAVAGILFFFVMGTLLRTSFSDPGVLPRATPDEAADLERQIDIANGTSSGGYRPPPRTKEVIINGQTVKLKYCFTCKIFRPPRASHCSLCDNCVERFDHHCPWVGNCVGKRNYRFFYMFILSLSFLTVFIFAFVITHVILRSQQTGFLNALKDSPASVLEAVVCFFSVWSIVGLSGFHTYLISSNQTTNEDIKGSWSNKRGKENYNPYSYGNIFTNCCVALCGPISPSLIDRRGYIQPDTPQPAAPSNGITMYGATQSQSDMCDQDQCIQSTKFVLQAAATPLLQSEPSLTSDELHLPGKPGLGTPCASLTLGPPTPPASMPNLAEATLADVMPRKDEHMGHQFLTPDEAPSPPRLLAAGSPLAHSRTMHVLGLASQDSLHEDSVRGLVKLSSV

SEQ ID NO: 1701 - DNA, 1947 bp, Homo sapiens
cggggtcccagcggaggatatcgcaaacggcaccagttcaggggggtaccgcccgcctcccagaaccaaagaagtcatcatcaatggccagaccgtgaaacttaaatactgtttcacctgcaagattttccggccccctcgcgcctcccattgcagcctttgtgataactgcgtagaacggtttgatcaccactgtccctgggtaggcaactgtgtggggaaaagaaactacagatttttttatatgtttattttatctctgtcttttctgacagtctttatatttgcattcgttatcacccacgtcattcttcgttcacagcaaacaggattcctaaatgcccttaaggacagcctccatcacatccacttcttgcgcggtccctcacttccgcttgcctccttgactcgcatcaccgtcctggaggctgtggtgtgcttcttctctgtctggtccatcgttggcctctcaggattccacacctacttgatcagctccaaccagacaacaaatgaggacattaaaggatcctggtcaaataaaagaggtaaagaaaattacaatccctacagctacggaaatatctttaccaactgctgtgttgccctgtgtgggcccatctcaccaagcctgatcgacagaagagggtacatccagcccgacacgccgcagccagcagcaccctccaatggcatcaccatgtacggggccacgcagtcacagagtgacatgtgcgaccaagaccagtgcattcagagcaccaaattcgttttgcaggctgcagccacgcccctgctgcagagcgagcccagcctcaccagcgacgagctgcacctgcccgggaagcctggcctgggcacgccctgcgccagcctcacactgggcccgcccacaccgcccgcctccatgcccaacctcgccgaggccacgctcgcggacgtgatgccccggaaagatgagcacatgggccaccagttcctgacgcccgatgaggcgccctcgccccccaggctactggcggcgggcagccccctggcgcacagccgcaccatgcacgtgctgggcctggccagccaggactccctgcatgaggactctgtgcgcggcctggtgaagctcagctccgtgtgacccacatggccccaggccgggggacaccagaggctcctccatgggcagcaggagtgagcggaggggtgtgtcccacagcgactttcccagccaatgccacggtggagatgacagccccaggtctggggtacagagaccacttaggatggcacagggtggctggccccggatgctgagagcttggtttcatttgaattttcttccccaacctgagtgctttgacaacaatggaaatagagaagtggctgctttcttttggtgaccctccaggggtggaatcggagtgtgtctgcccgcccttgtgacagacacacggaaggcttctgacgcttgtggccagactgcaattgcacttatgtgttatgctactaatatttgaaacagacctgccattccatttgttaattaaaaaaaaaaaaaatcctaaagggaaaaaaccgaccaggtgtggatctgcatgccacgctgccgtctgtgttacagtggtgttgctatttccaaggaagtgctgctttctttttctttttttaattttgtgaattttcaagtgctgttttgttggaagacagtgcaacgaactgagactaatggacagtgtcatcactcagcttactgggctgaggcgtctgtggagaggtggcaccggggctgcagagggcggctggggttccgtcgtgtcgggtgtcacttcaccttctgtttggccgctcgatgaggtctcgtgttgagatattgtgtgccacaacccccacagtcttcacctccgtgtgtgatgaaacttcccgtggacagccaataaaatgacgtcctctgtt

SEQ ID NO: 1702 - protein, 295 aa, Homo sapiens
MFILSLSFLTVFIFAFVITHVILRSQQTGFLNALKDSLHHIHFLRGPSLPLASLTRITVLEAVVCFFSVWSIVGLSGFHTYLISSNQTTNEDIKGSWSNKRGKENYNPYSYGNIFTNCCVALCGPISPSLIDRRGYIQPDTPQPAAPSNGITMYGATQSQSDMCDQDQCIQSTKFVLQAAATPLLQSEPSLTSDELHLPGKPGLGTPCASLTLGPPTPPASMPNLAEATLADVMPRKDEHMGHQFLTPDEAPSPPRLLAAGSPLAHSRTMHVLGLASQDSLHEDSVRGLVKLSSV

SEQ ID NO: 1703 - DNA, 1899 bp, Homo sapiens
gatatcgcaaacggcaccagttcaggggggtaccgcccgcctcccagaaccaaagaagtcatcatcaatggccagaccgtgaaacttaaatactgtttcacctgcaagattttccggccccctcgcgcctcccattgcagcctttgtgataactgcgtagaacggtttgatcaccactgtccctgggtaggcaactgtgtggggaaaagaaactacagatttttttatatgtttattttatctctgtcttttctgacagtctttatatttgcattcgttatcacccacgtcattcttcgcctccatcacatccacttcttgcgcggtccctcacttccgcttgcctccttgactcgcatcaccgtcctggaggctgtggtgtgcttcttctctgtctggtccatcgttggcctctcaggattccacacctacttgatcagctccaaccagacaacaaatgaggacattaaaggatcctggtcaaataaaagaggtaaagaaaattacaatccctacagctacggaaatatctttaccaactgctgtgttgccctgtgtgggcccatctcaccaagcctgatcgacagaagagggtacatccagcccgacacgccgcagccagcagcaccctccaatggcatcaccatgtacggggccacgcagtcacagagtgacatgtgcgaccaagaccagtgcattcagagcaccaaattcgttttgcaggctgcagccacgcccctgctgcagagcgagcccagcctcaccagcgacgagctgcacctgcccgggaagcctggcctgggcacgccctgcgccagcctcacactgggcccgcccacaccgcccgcctccatgcccaacctcgccgaggccacgctcgcggacgtgatgccccggaaagatgagcacatgggccaccagttcctgacgcccgatgaggcgccctcgccccccaggctactggcggcgggcagccccctggcgcacagccgcaccatgcacgtgctgggcctggccagccaggactccctgcatgaggactctgtgcgcggcctggtgaagctcagctccgtgtgacccacatggccccaggccgggggacaccagaggctcctccatgggcagcaggagtgagcggaggggtgtgtcccacagcgactttcccagccaatgccacggtggagatgacagccccaggtctggggtacagagaccacttaggatggcacagggtggctggccccggatgctgagagcttggtttcatttgaattttcttccccaacctgagtgctttgacaacaatggaaatagagaagtggctgctttcttttggtgaccctccaggggtggaatcggagtgtgtctgcccgcccttgtgacagacacacggaaggcttctgacgcttgtggccagactgcaattgcacttatgtgttatgctactaatatttgaaacagacctgccattccatttgttaattaaaaaaaaaaaaaatcctaaagggaaaaaaccgaccaggtgtggatctgcatgccacgctgccgtctgtgttacagtggtgttgctatttccaaggaagtgctgctttctttttctttttttaattttgtgaattttcaagtgctgttttgttggaagacagtgcaacgaactgagactaatggacagtgtcatcactcagcttactgggctgaggcgtctgtggagaggtggcaccggggctgcagagggcggctggggttccgtcgtgtcgggtgtcacttcaccttctgtttggccgctcgatgaggtctcgtgttgagatattgtgtgccacaacccccacagtcttcacctccgtgtgtgatgaaacttcccgtggacagccaataaaatgacgtcctctgttattttgg

SEQ ID NO: 1704 - protein, 358 aa, Homo sapiens
DIANGTSSGGYRPPPRTKEVIINGQTVKLKYCFTCKIFRPPRASHCSLCDNCVERFDHHCPWVGNCVGKRNYRFFYMFILSLSFLTVFIFAFVITHVILRLHHIHFLRGPSLPLASLTRITVLEAVVCFFSVWSIVGLSGFHTYLISSNQTTNEDIKGSWSNKRGKENYNPYSYGNIFTNCCVALCGPISPSLIDRRGYIQPDTPQPAAPSNGITMYGATQSQSDMCDQDQCIQSTKFVLQAAATPLLQSEPSLTSDELHLPGKPGLGTPCASLTLGPPTPPASMPNLAEATLADVMPRKDEHMGHQFLTPDEAPSPPRLLAAGSPLAHSRTMHVLGLASQDSLHEDSVRGLVKLSSV

SEQ ID NO: 1705 - DNA, 5812 bp, Homo sapiens
ctgcaggccgcccgcgtctgccctcgcggcgcgctcccgggcccggccgcggttccccactcgggccggctggctcgcgggttctctcgccccgcccccctcggcgccaccgctgggcgcttgcgcggggcgcgtggccgtggccagggtctccgccgcagcccgagcagccgccgccgcctcagtcagtcagtcagtccccagcaatggcggacggaggtgagcgagaggagctgctctcgccgtcaccggtctctccggctaagcggcagtgttcgtggcccagcccgcaggctcatcaccctcgcggttcgcctggggcagccggcggaggggcagggggcgtcggcagcagctgcctggtcctcggggcccgcccccacctgcagccggattccttactggactgcgccgccaagacggtggcggaaaagtgggcatacgaacgggtggaggagcgcttcgagcggatcccggagcccgtgcagcgccgcatcgtctactggtccttcccgcggaatgagcgggagatctgcatgtactccagcttccagtaccggggcggccccggcgccggcgctgctggcggcgccgcgggggcttcgccggccgaggaggggccgcagccaccccccggggccgccgctccggccggctccgcccccgggggcgtcgcggctggggcatcccccgggctgggcgcaggggccggcgcggccggctgcggtggcgaggggctcccgttccgccggggcatccgtctgctggacagcggctccgtggagaacgtgctgcaagtcggctttcatctgagtggcacagtaactgagctggccactgcctctgaaccagcagtgacttataaagttgcaatcagttttgatcgatgcaaaatcacctcagtgacatgtggctgtgggaacaaggacatattctactgtgcccatgtggtagcactctcactctacaggatccgtaaaccagaccaagtcaaattgcgtcttcctatctccgaaacccttttccagatgaatagggaccagctacaaaagtttattcaatatttaatcacggcacaccacactgaagttcttcctactgcacagaaactggcagatgagattctatcctccaactcagaaatcaaccaagtgaatggtgcccctgaccccacagctggggccagcattgacgatgagaactgttggcatttggatgaagaacaggtgaaagaacaagtgaagctttttctctcccagggcggttactgtggctctggaaagcaactcaactcaatgtttgccaaggttcgagaaatgctgcggatgagagattccaatggagcaaggatgctgacactaataactgagcagtttgtggctgacccacgactcacactctggaggcagcaaggaacaaacatgacagacaagtgcaggcagctctgggatgagctaggggctttatgggtgtgcataattttaaatccacactgcaaactggaggagaaatcctgctggctgcagcagctgcagaagtggagcgacctggatgtctgtcccctggaggatggaaactatggacatgagctgcccaacatcaccaatgcacttccccagagtgccattcacagcccagactccttatccagaccaagacgaacagtattcactagagccattgaggggcgtgaattacattggcaggatagccacctacagcgaataatcagcagtgatgtttatacagctcctgcctgccagcgggaaagtgaaagactactctttaattcccaaggccagccactgtggcttgagcatgtgcctacagcctgtgctcgagttgacgccctgcgttcccatggttatccaaaagaggccctcagactcacagtggccattattaatactctgaggttgcagcagcagcggcaactggaaatctacaagcatcagaagaaagaactgttgcagagaggaaccacaaccatcacaaacctggagggctgggtgggccaccccctggatcccatcgactgcctgtttctcactttgactgaggcctgccgcctgaatgatgatggctatctggagatgtcagatatgaatgaaagcagaccccctgtgtaccagcatgtacctgtggctgcaggctccccaaacagcagtgagtcctacctgtcattggccctggaagttgcactgatgggcctgggtcaacagaggttaatgcctgaaggcctctacgcacaggacaaggtatgccgtaatgaggagcagctcctgagccaactccaagagctgcagctggacgatgagctagtgcaaacactgcaaaaacaatgcatcttactgctggaaggaggtcctttcagcggtctgggagaagtcatccaccgagagagtgttcccatgcatacctttgccaagtatttgttctcagctctgctgcctcatgatccagacctgtcctataaattagccttacgtgccatgaggttacctgttttagaaaactcagcttctgcaggcgacacatcccaccctcaccatatggtgtctgtggtgcccagccgttatcctcgctggttcacgcttggacacttggaatcacagcagtgtgaactggcctccaccatgctgactgctgccaaaggagacactttgagactccgaacaattctggaagcaatacagaagcacattcattcttcctccctcatcttcaaactggcccaagatgcattcaagattgctactcccaccgacagtagtactgacagcaccctgctcaacgttgccctggaacttgggttacaggtgatgcggatgaccttatcaacccttaactggagacgcagggagatggtacgatggttggtgacctgtgctacagaagtgggtgtgcgggccctggtgagcatcttgcagagctggtacacactcttcacccctactgaggctactagtattgtagctgccacagccgtatcccacaccactatcctgcgcctcagtcttgactatccacagcgggaggaactggctagctgtgctcgcacactggctctacagtgtgctatgaaggatccacagagctgtgccctgtcagcccttacactctgtgagaaagaccacattgcctttgaggcagcctaccagattgccattgatgctgctgctggtggtatgacccattcacagctgttcaccatcgcccgctacatggagctccgtggctacccgctacgtgccttcaagctggcctcattggccatgagccatcttaacctggcctacaaccaggatactcacccagccatcaatgatgtgctctgggcttgtgctctcagccactctctgggcaagaatgagctggcagctctcatccccctggtggtgaagagtgtgcactgtgccacagtgctttcagacatcttacgacgctgcacagtgactgcacctggcctggccggcatcccaggccgccgaagctctggaaagctcatgtccactgacaaagctccattgcgccagttgctggatgccaccatcaatgcctatatcaacactacacactcacgcctaacacacatcagccctcgccactatggagagttcattgagtttctaagcaaggctcgggagaccttcctgctgccccaggatggccacctgcagtttgcccagttcatcgacaacctcaaacagatctacaaaggcaagaaaaagttgatgctgctggtgcgagagcgctttggctgagagagcagatagctcactgccagagcagcctgggttcccaggtagtatcaggtcaggccaagggcactgaaacatttgtccaccctgagagaactctgagcacctgtggatgaggccaaaggaccacagggctaaggatggggaaagtccagctctagtcgataatgcctaccttggcaagcttctgactacagcctactgttcatggaggagctgggccctgcagatcgaccagaaaccccacaacatgccacctcatgcccctatatcctgcgtgtcctgagcattggccctgtctcccttggcaaacacagaacactgttccatctcagggattgcttaaccagagaaacagacacatttgtgggactgtaaatactatatgtgttgctaattattgtaaacttgtaactatttataattctgcttctgatttgatgggcacttgaagtagctgtgggtaggaggatatgcttattttctgaggagactcacaaccatttctcaggtttcccttgcagagtgtttgctggtagcagtggaagagtgggggtgccaaggagaaaaatggccagttaggatcaacccaagtctagtctatgcagaatcccccacctacagacagggcatttatagtccagtggtgagtgagggacagaggccaggactggacttagacttttgcctcacaaaactgtgaggacattgaagctcctgcctcacacagcctcttcaggagcctgctgaacacctgagaaacaagtgcagggagaagatgaaggtctgggaagccgctgagttcataatattcatctactgtggtcacctttgtgttagcaagtgtgtggtttcatctataattgtgtgtgtgtatctttatggctaagtacatgtgtgtatgtacatagatacatctgtgcatgcctgtttgtgcacatatatatttatgtgtatgtgtcagttctatggctgtgtacctgtttgaatatgtgcacactggactgtgagtttctacgtgaggatatacacattttgtgtacatgtgaggatgcacatctttgtgcaaatgcactcatgtttgtgcatgtttagtatgtgtatctgcgtacacgagtgcatgtgtataaacatgtttgtatccatgtgtatgcttgttatccatgcatctgtgtctttatatgtgtaactgagcgtatttctacatgtagggatgtctgtgtattcatgtttgaggatctgcatcaatgtgtcctttttgccagatttctctttcccattcctcttaaatctctctcgccagctaaacgtttgttccccatctctgtgcctcctctattcattctctcaccaaacaagcttctaagcaccaatctccctctgccatcagattggctgctttagctccatagttctcttctcgcctcatacttgctttcttcccctgcctttctacctcaagcttcctcgccggcttttgtcacagtctcattgctcgctgacttggaggctagggctggtctgcacttagcctctcccttcctaatttctagccctagtgggcagtcctgtcttagccctggctgacctccatagtgtatcatgttcctgctaccttcctgacccctgtgctcagcctggaattgttataggaggtagcaagggcactcagaaaagtcagttggaaccagtgtcttggtgtttactgtttcatgtcttagttcctgagttgggggtggggtttgatagggaaggggtggtatagctagaatgtgaactaagaacttctccatctgctttactttttctttcttcgacaaactgtcaccttttttactccaaactgaccaagaagttgtatttgccatttgtggctactcaagtcttactgtccagccaagggcccctacgtctcagcccaatgggttggttaaaaaaaagagagaagccactctcatttctgtatcacagttgcccttttttagcaagtgtgtgaattcacagtgcttttctatgaataaatcatggatcacataaaagatcatttttct

SEQ ID NO: 1706 - protein, 1185 aa, Homo sapiens
MADGGEREELLSPSPVSPAKRQCSWPSPQAHHPRGSPGAAGGGAGGVGSSCLVLGARPHLQPDSLLDCAAKTVAEKWAYERVEERFERIPEPVQRRIVYWSFPRNEREICMYSSFQYRGGPGAGAAGGAAGASPAEEGPQPPPGAAAPAGSAPGGVAAGASPGLGAGAGAAGCGGEGLPFRRGIRLLDSGSVENVLQVGFHLSGTVTELATASEPAVTYKVAISFDRCKITSVTCGCGNKDIFYCAHVVALSLYRIRKPDQVKLRLPISETLFQMNRDQLQKFIQYLITAHHTEVLPTAQKLADEILSSNSEINQVNGAPDPTAGASIDDENCWHLDEEQVKEQVKLFLSQGGYCGSGKQLNSMFAKVREMLRMRDSNGARMLTLITEQFVADPRLTLWRQQGTNMTDKCRQLWDELGALWVCIILNPHCKLEEKSCWLQQLQKWSDLDVCPLEDGNYGHELPNITNALPQSAIHSPDSLSRPRRTVFTRAIEGRELHWQDSHLQRIISSDVYTAPACQRESERLLFNSQGQPLWLEHVPTACARVDALRSHGYPKEALRLTVAIINTLRLQQQRQLEIYKHQKKELLQRGTTTITNLEGWVGHPLDPIDCLFLTLTEACRLNDDGYLEMSDMNESRPPVYQHVPVAAGSPNSSESYLSLALEVALMGLGQQRLMPEGLYAQDKVCRNEEQLLSQLQELQLDDELVQTLQKQCILLLEGGPFSGLGEVIHRESVPMHTFAKYLFSALLPHDPDLSYKLALRAMRLPVLENSASAGDTSHPHHMVSVVPSRYPRWFTLGHLESQQCELASTMLTAAKGDTLRLRTILEAIQKHIHSSSLIFKLAQDAFKIATPTDSSTDSTLLNVALELGLQVMRMTLSTLNWRRREMVRWLVTCATEVGVRALVSILQSWYTLFTPTEATSIVAATAVSHTTILRLSLDYPQREELASCARTLALQCAMKDPQSCALSALTLCEKDHIAFEAAYQIAIDAAAGGMTHSQLFTIARYMELRGYPLRAFKLASLAMSHLNLAYNQDTHPAINDVLWACALSHSLGKNELAALIPLVVKSVHCATVLSDILRRCTVTAPGLAGIPGRRSSGKLMSTDKAPLRQLLDATINAYINTTHSRLTHISPRHYGEFIEFLSKARETFLLPQDGHLQFAQFIDNLKQIYKGKKKLMLLVRERFG

SEQ ID NO: 1707 - DNA, 468 bp, Homo sapiens
gttgcaggctcctttagctgcaccatgaagtttacagtccgggactgtgaccctaacactggagttccagatgaggatgggtatgatgatgagtatgtgctggaagatctcgaagtgactgtgtctgaccatattcagaaagtactgaagcctaactttgctgctgcttgggaagaggtgggagatacctttgagaaagaggaaacctttgccctcagttctaccaaaacccttgaagaggctgtcaacaatatcatcacatttctgggcatgcagccatgtgagaggtccgataaagtacctgagaacaagaattcccattcgctctatctggcaggtatattcagaggtggctatgatttattggtgaggtccaggctggccttagccgatggagtgaccatgcaggtgactgtcagaagtaaagagagaacacctgtagatgttatcttagcttctgttggataa

SEQ ID NO: 1708 - protein, 155 aa, Homo sapiens
VAGSFSCTMKFTVRDCDPNTGVPDEDGYDDEYVLEDLEVTVSDHIQKVLKPNFAAAWEEVGDTFEKEETFALSSTKTLEEAVNNIITFLGMQPCERSDKVPENKNSHSLYLAGIFRGGYDLLVRSRLALADGVTMQVTVRSKERTPVDVILASVG

SEQ ID NO: 1709 - DNA, 5663 bp, Homo sapiens
gagggagatagcgtgcatccagaaagacaaagacattcctgcggaggatatcatctgtgagtactttgagcccaagcctctcctggagcaggcttgcctcattccttgccagcaagattgcatcgtgtctgaattttctgcctggtccgaatgctccaagacctgcggcagcgggctccagcaccggacgcgtcatgtggtggcgcccccgcagttcggaggctctggctgtccaaacctgacggagttccaggtgtgccaatccagtccatgcgaggccgaggagctcaggtacagcctgcatgtggggccctggagcacctgctcaatgccccactcccgacaagtaagacaagcaaggagacgcgggaagaataaagaacgggaaaaggaccgcagcaaaggagtaaaggatccagaagcccgcgagcttattaagaaaaagagaaacagaaacaggcagaacagacaagagaacaaatattgggacatccagattggatatcagaccagagaggttatgtgcattaacaagacggggaaagctgctgatttaagcttttgccagcaagagaagcttccaatgaccttccagtcctgtgtgatcaccaaagagtgccaggtttccgagtggtcagagtggagcccctgctcaaaaacatgccatgacatggtgtcccctgcaggcactcgtgtaaggacacgaaccatcaggcagtttcccattggcagtgaaaaggagtgtccagaatttgaagaaaaagaaccctgtttgtctcaaggagatggagttgtcccctgtgccacgtatggctggagaactacagagtggactgagtgccgtgtggaccctttgctcagtcagcaggacaagaggcgcggcaaccagacggccctctgtggagggggcatccagacccgagaggtgtactgcgtgcaggccaacgaaaacctcctctcacaattaagtacccacaagaacaaagaagcctcaaagccaatggacttaaaattatgcactggacctatccctaatactacacagctgtgccacattccttgtccaactgaatgtgaagtttcaccttggtcagcttggggaccttgtacttatgaaaactgtaatgatcagcaagggaaaaaaggcttcaaactgaggaagcggcgcattaccaatgagcccactggaggctctggggtaaccggaaactgccctcacttactggaagccattccctgtgaagagcctgcctgttatgactggaaagcagtgagactgggaaactgcgagccagataacggaaaggagtgtggtccaggcacgcaagttcaagaggttgtgtgcatcaacagtgatggagaagaagttgacagacagctgtgcagagatgccatcttccccatccctgtggcctgtgatgccccatgcccgaaagactgtgtgctcagcacatggtctacgtggtcctcctgctcacacacctgctcagggaaaacgacagaagggaaacagatacgagcacgatccattctggcctatgcgggtgaagaaggtggaattcgctgtccaaatagcagtgctttgcaagaagtacgaagctgtaatgagcatccttgcacagtgtaccactggcaaactggtccctggggccagtgcattgaggacacctcagtatcgtccttcaacacaactacgacttggaatggggaggcctcctgctctgtcggcatgcagacaagaaaagtcatctgtgtgcgagtcaatgtgggccaagtgggacccaaaaaatgtcctgaaagccttcgacctgaaactgtaaggccttgtctgcttccttgtaagaaggactgtattgtgaccccatatagtgactggacatcatgcccctcttcgtgtaaagaaggggactccagtatcaggaagcagtctaggcatcgggtcatcattcagctgccagccaacgggggccgagactgcacagatcccctctatgaagagaaggcctgtgaggcacctcaagcgtgccaaagctacaggtggaagactcacaaatggcgcagatgccaattagtcccttggagcgtgcaacaagacagccctggagcacaggaaggctgtgggcctgggcgacaggcaagagccattacttgtcgcaagcaagatggaggacaggctggaatccatgagtgcctacagtatgcaggccctgtgccagcccttacccaggcctgccagatcccctgccaggatgactgtcaattgaccagctggtccaagttttcttcatgcaatggagactgtggtgcagttaggaccagaaagcgcactcttgttggaaaaagtaaaaagaaggaaaaatgtaaaaattcccatttgtatcccctgattgagactcagtattgtccttgtgacaaatataatgcacaacctgtggggaactggtcagactgtattttaccagagggaaaagtggaagtgttgctgggaatgaaagtacaaggagacatcaaggaatgcggacaaggatatcgttaccaagcaatggcatgctacgatcaaaatggcaggcttgtggaaacatctagatgtaacagccatggttacattgaggaggcctgcatcatcccctgcccctcagactgcaagctcagtgagtggtccaactggtcgcgctgcagcaagtcctgtgggagtggtgtgaaggttcgttctaaatggctgcgtgaaaaaccatataatggaggaaggccttgccccaaactggaccatgtcaaccaggtgtatgaggttgtcccatgccacagtgactgcaaccagtacctatgggtcacagagccctggagcatctgcaaggtgacctttgtgaatatgcgggagaactgtggagagggcgtgcaaacccgaaaagtgagatgcatgcagaatacagcagatggcccttctgaacatgtagaggattacctctgtgacccagaagagatgcccctgggctctagagtgtgcaaattaccatgccctgaggactgtgtgatatctgaatggggtccatggacccaatgtgttttgccttgcaatcaaagcagtttccggcaaaggtcagctgatcccatcagacaaccagctgatgaaggaagatcttgccctaatgctgttgagaaagaaccctgtaacctgaacaaaaactgctaccactatgattataatgtaacagactggagtacatgtcagctgagtgagaaggcagtttgtggaaatggaataaaaacaaggatgttggattgtgttcgaagtgatggcaagtcagttgacctgaaatattgtgaagcgcttggcttggagaagaactggcagatgaacacgtcctgcatggtggaatgccctgtgaactgtcagctttctgattggtctccttggtcagaatgttctcaaacatgtggcctcacaggaaaaatgatccgaagacgaacagtgacccagccctttcaaggtgatggaagaccatgcccttccctgatggaccagtccaaaccctgcccagtgaagccttgttatcggtggcaatatggccagtggtctccatgccaagtgcaggaggcccagtgtggagaagggaccagaacaaggaacatttcttgtgtagtaagtgatgggtcagctgatgatttcagcaaagtggtggatgaggaattctgtgctgacattgaactcattatagatggtaataaaaatatggttctggaggaatcctgcagccagccttgcccaggtgactgttatttgaaggactggtcttcctggagcctgtgtcagctgacctgtgtgaatggtgaggatctaggctttggtggaatacaggtcagatccagaccggtgattatacaagaactagagaatcagcatctgtgcccagagcagatgttagaaacaaaatcatgttatgatggacagtgctatgaatataaatggatggccagtgcttggaagggctcttcccgaacagtgtggtgtcaaaggtcagatggtataaatgtaacagggggctgcttggtgatgagccagcctgatgccgacaggtcttgtaacccaccgtgtagtcaaccccactcgtactgtagcgagacaaaaacatgccattgtgaagaagggtacactgaagtcatgtcttctaacagcacccttgagcaatgcacacttatccccgtggtggtattacccaccatggaggacaaaagaggagatgtgaaaaccagtcgggctgtacatccaacccaaccctccagtaacccagcaggacggggaaggacctggtttctacagccatttgggccagatgggagactaaagacctgggtttacggtgtagcagctggggcatttgtgttactcatctttattgtctccatgatttatctagcttgcaaaaagccaaagaaaccccaaagaaggcaaaacaaccgactgaaacctttaaccttagcctatgatggagatgccgacatgtaacatataacttttcctggcaacaaccagtttcggctttctgacttcatagatgtccagaggccacaacaaatgtatccaaactgtgtggattaaaatatattttaatttttaaaaatggcatcataaagacaagagtgaaaatcatactgccactggagatatttaagacagtaccacttatatacagaccatcaaccgtgagaattataggagatttagctgaatacatgctgcattctgaaagttttatgtcatcttttctgaaatctaccgactgaaaaaccactttcatctctaaaaaataatggtggaattggccagttaggatgcctgatacaagaccgtctgcagtgttaatccataaaacttcctagcatgaagagtttctaccaagatctccacaatactatggtcaaattaacatgtgtactcagttgaatgacacacattatgtcagattatgtacttgctaataagcaattttaacaatgcataacaaataaactctaagctaagcagaaaatccactgaataaattcagcatcttggtggtcgatggtagattttattgacctgcatttcagagacaaagcctcttttttaagacttcttgtctctctccaaagtaagaatgctggacaagtactagtgtcttagaagaacgagtcctcaagttcagtattttatagtggtaattgtctggaaaactaatttacttgtgttaatacaatacgtttctactttccctgattttcaaactggttgcctgcatcttttttgctatatggaaggcacatttttgcactatattagtgcagcacgataggcgcttaaccagtattgccatagaaactgcctcttttcatgtgggatgaagacatctgtgccaagagtggcatgaagacatttgcaagttcttgtatcctgaagagagtaaagttcagtttggatggcagcaagatgaaatcagctattacacctgctgtacacacacttcctcatcactgcagccattgtgaaattgacaacatggcggtaatttaagtgttgaagtccctaaccccttaaccctctaaaaggtggattcctctagttggtttgtaattgttctttgaaggctgtttatgactagatttttatatttgttatctttgttaag

SEQ ID NO: 1710 - protein, 1500 aa, Homo sapiens
REIACIQKDKDIPAEDIICEYFEPKPLLEQACLIPCQQDCIVSEFSAWSECSKTCGSGLQHRTRHVVAPPQFGGSGCPNLTEFQVCQSSPCEAEELRYSLHVGPWSTCSMPHSRQVRQARRRGKNKEREKDRSKGVKDPEARELIKKKRNRNRQNRQENKYWDIQIGYQTREVMCINKTGKAADLSFCQQEKLPMTFQSCVITKECQVSEWSEWSPCSKTCHDMVSPAGTRVRTRTIRQFPIGSEKECPEFEEKEPCLSQGDGVVPCATYGWRTTEWTECRVDPLLSQQDKRRGNQTALCGGGIQTREVYCVQANENLLSQLSTHKNKEASKPMDLKLCTGPIPNTTQLCHIPCPTECEVSPWSAWGPCTYENCNDQQGKKGFKLRKRRITNEPTGGSGVTGNCPHLLEAIPCEEPACYDWKAVRLGNCEPDNGKECGPGTQVQEVVCINSDGEEVDRQLCRDAIFPIPVACDAPCPKDCVLSTWSTWSSCSHTCSGKTTEGKQIRARSILAYAGEEGGIRCPNSSALQEVRSCNEHPCTVYHWQTGPWGQCIEDTSVSSFNTTTTWNGEASCSVGMQTRKVICVRVNVGQVGPKKCPESLRPETVRPCLLPCKKDCIVTPYSDWTSCPSSCKEGDSSIRKQSRHRVIIQLPANGGRDCTDPLYEEKACEAPQACQSYRWKTHKWRRCQLVPWSVQQDSPGAQEGCGPGRQARAITCRKQDGGQAGIHECLQYAGPVPALTQACQIPCQDDCQLTSWSKFSSCNGDCGAVRTRKRTLVGKSKKKEKCKNSHLYPLIETQYCPCDKYNAQPVGNWSDCILPEGKVEVLLGMKVQGDIKECGQGYRYQAMACYDQNGRLVETSRCNSHGYIEEACIIPCPSDCKLSEWSNWSRCSKSCGSGVKVRSKWLREKPYNGGRPCPKLDHVNQVYEVVPCHSDCNQYLWVTEPWSICKVTFVNMRENCGEGVQTRKVRCMQNTADGPSEHVEDYLCDPEEMPLGSRVCKLPCPEDCVISEWGPWTQCVLPCNQSSFRQRSADPIRQPADEGRSCPNAVEKEPCNLNKNCYHYDYNVTDWSTCQLSEKAVCGNGIKTRMLDCVRSDGKSVDLKYCEALGLEKNWQMNTSCMVECPVNCQLSDWSPWSECSQTCGLTGKMIRRRTVTQPFQGDGRPCPSLMDQSKPCPVKPCYRWQYGQWSPCQVQEAQCGEGTRTRNISCVVSDGSADDFSKVVDEEFCADIELIIDGNKNMVLEESCSQPCPGDCYLKDWSSWSLCQLTCVNGEDLGFGGIQVRSRPVIIQELENQHLCPEQMLETKSCYDGQCYEYKWMASAWKGSSRTVWCQRSDGINVTGGCLVMSQPDADRSCNPPCSQPHSYCSETKTCHCEEGYTEVMSSNSTLEQCTLIPVVVLPTMEDKRGDVKTSRAVHPTQPSSNPAGRGRTWFLQPFGPDGRLKTWVYGVAAGAFVLLIFIVSMIYLACKKPKKPQRRQNNRLKPLTLAYDGDADM

SEQ ID NO: 1711 - DNA, 4103 bp, Homo sapiens
ggcgcctgcggcggcgacagcggcagctgcggcgcgaccaggccgggcacctccgagcgcaaggacagcgcgaggtccgcgcagcccagcgcagccatggagccccgcgcggactcactctatgatgtccctgtcggtgcggccgcagcgccgtctgctcagcgcccgggtcaataggagccagtccttcgcaggcgtcctcggcagccacgagcgggggcccaggagtttcccggtcttcagcccgccggggcccccacggaagccccccgcgctctcccgagtgtccaggatgttttccgtggctcacccagccgccaaggtgccgcagcccgagcggctggacctggtgtacacggcgctgaagcggggcctgacggcctacttggaagtgcaccagcaggagcaagagaaactccaggggcagataagggagtccaagaggaattcccgcttgggcttcctgtatgatctggacaagcaagtcaagtccattgaacgcttcctgcgacgactggagttccatgccagcaagatcgatgagctgtatgaggcatactgtgtccagcggcgtctccgggatggtgcctacaacatggtccgtgcctacaccactgggtccccgggaagccgagaggcccgggacagcctggcagaggccactcgggggcatcgcgagtacacggagagcatgtgtctgctggagagcgagctggaggcacagctgggcgagtttcatctccgaatgaaagggctggctggcttcgccaggctgtgtgtaggcgatcagtatgagatctgcatgaaatatgggcgtcagcgctggaaactacggggccgaattgagggtagtggaaagcaggtgtgggacagtgaagaaaccatctttctccctctactcacggaatttctgtctattaaggtgacagaactgaagggcctggccaaccatgtggttgtgggcagtgtctcctgtgagaccaaggacctgtttgccgccctgccccaggttgtggctgtggatatcaatgaccttggtaccatcaagctcagcctggaagtcacatggagccccttcgacaaggatgaccagccctcagctgcttcttctgtcaacaaggcctccacagtcaccaagcgcttctccacctatagccagagcccaccggacacaccctcacttcgggaacaggctttctataacatgctgcgacggcaggaggagctggagaatgggacagcatggtccctgtcatctgaatcttcagacgactcatccagcccacagctctcaggcactgcccgccactcaccagcccctaggcccctggtgcagcagcccgagccccttcccatccaagttgccttccgcaggcctgagacccccagctctgggcccttggatgaggagggggccgtggccccagtcctggcaaatgggcatgcaccctacagtcggactctgagccacatcagtgaggctagtgtagatgctgccttggctgaggcttcagtggaggccgttggcccagaaagcctagcctggggacctagcccacctacacacccagctcccacccatggagagcaccccagtcctgttcctcctgccctggaccctggccactctgccacaagctctaccctcggtacaacaggctctgtccccacatctacagaccctgccccatctgcacacctagactcagttcataagtccacagactctggcccttcagaactgccaggccccactcacaccactacaggctctacctatagtgccattaccactacccacagtgctccaagccccctcactcacactactacaggctccacccacaagcccataatctctacccttactactacaggccctaccctcaatatcataggcccagtccagactaccacaagccccacccacactatgccaagccctacccataccacagcaagccccactcatacttccacaagccccacccatacccccacaagtcccacccacaaaaccagtatgtcacctcccaccactacaagtcctacccccagtggtatgggcctagtccagactgccacaagtcccacccatcctaccacaagccccacccatcccaccacaagccccatccttataaatgtaagcccttccacttctctagaacttgctaccctctccagcccctccaaacactcagaccccaccctcccaggcactgactcccttccctgtagtcccccagtctccaattcctacactcaggcagaccctatggcccccagaactccccacccaagtcctgcccattccagtaggaaacccctcacaagccctgccccagatccctcagagtctacggttcagagtctaagccccactccctcacccccaacccctgcaccccagcattcagacctttgcctggccatggctgtccagaccccagtcccaacggcagccggagggtctggggacaggagcctggaggaggcactgggggccctaatggctgccctggatgactaccgtggccagtttcctgagctgcagggcctggagcaggaggtgacccgcctagaaagtctgctcatgcagagacaaggtctgactcgcagccgggcctccagtctcagcatcactgtggagcatgccttggagagcttcagcttcctcaatgaagacgaagatgaagacaatgatgttcctggggacaggcctccaagcagcccggaggctggggctgaggacagcatagactcacccagtgcccgccccctcagcacggggtgtccagctctggatgctgccttggtccggcacctgtaccactgcagtcgcctcctgctgaaactgggcacatttgggcccctgcgctgccaggaggcatgggccctggagcggctgctgcgggaagcccgagtactggaggcagtatgcgagttcagcaggcggtgggagatcccggccagctctgcccaggaagtggtgcagttctcggcctctcggcctggcttcctgaccttctgggaccagtgcacagagagactcagctgcttcctctgcccggtggagcgggtgcttctcaccttctgcaaccagtatggtgcccgcctctccctgcgccagccaggcttggctgaggctgtgtgtgtgaagttcctggaggatgccctggggcagaagctgcccagaaggccccagccagggcctggagagcagctcacagtcttccagttctggagttttgtggaaaccttggacagccccaccatggaggcctacgtgactgagaccgctgaggaggtgctactggtgcggaatctgaactcggatgatcaggctgttgtgctgaaggccctgagattggcgcccgaggggcgtctgcgaagggacgggctgcgggccctcagctccctgctcgtccatggcaacaacaaggtcatggctgctgtcagcacccagctccggagcctgtcactgggccctaccttccgggagagggccctcctgtgcttcctggaccagctggaggatgaggacgtgcagactcgagtggctggctgcctggccctaggctgcatcaaggctcccgagggcattgagcccctggtgtacctctgccaaactgacacagaagctgtgagggaagctgcccggcaaagcctacagcagtgtggagaagagggacagtctgcccatcgacggctggaggagtccctggacgccctgccccgcatctttgggcctggcagcatggccagcacagcattctaaactattcacccatgggttcctggtgcccctttccccccactttcagggctcaccaggcactggcagggagggtaagggctggctccagatacccctcccccacagattcctagcaatgaaaatctaatatattcttctgttgcccctggggttggagagtcagtgcctgcagtcaagtgcctcccagcctcggctcagcacatcccttgccacaaatcagtgtctggggcttggccaccctgccgctgcccagccacatcccttggttttgtattttatttacagagttttacagaaaataaaaaagcaaaatgtctttcct

SEQ ID NO: 1712 - protein, 1219 aa, Homo sapiens
MMSLSVRPQRRLLSARVNRSQSFAGVLGSHERGPRSFPVFSPPGPPRKPPALSRVSRMFSVAHPAAKVPQPERLDLVYTALKRGLTAYLEVHQQEQEKLQGQIRESKRNSRLGFLYDLDKQVKSIERFLRRLEFHASKIDELYEAYCVQRRLRDGAYNMVRAYTTGSPGSREARDSLAEATRGHREYTESMCLLESELEAQLGEFHLRMKGLAGFARLCVGDQYEICMKYGRQRWKLRGRIEGSGKQVWDSEETIFLPLLTEFLSIKVTELKGLANHVVVGSVSCETKDLFAALPQVVAVDINDLGTIKLSLEVTWSPFDKDDQPSAASSVNKASTVTKRFSTYSQSPPDTPSLREQAFYNMLRRQEELENGTAWSLSSESSDDSSSPQLSGTARHSPAPRPLVQQPEPLPIQVAFRRPETPSSGPLDEEGAVAPVLANGHAPYSRTLSHISEASVDAALAEASVEAVGPESLAWGPSPPTHPAPTHGEHPSPVPPALDPGHSATSSTLGTTGSVPTSTDPAPSAHLDSVHKSTDSGPSELPGPTHTTTGSTYSAITTTHSAPSPLTHTTTGSTHKPIISTLTTTGPTLNIIGPVQTTTSPTHTMPSPTHTTASPTHTSTSPTHTPTSPTHKTSMSPPTTTSPTPSGMGLVQTATSPTHPTTSPTHPTTSPILINVSPSTSLELATLSSPSKHSDPTLPGTDSLPCSPPVSNSYTQADPMAPRTPHPSPAHSSRKPLTSPAPDPSESTVQSLSPTPSPPTPAPQHSDLCLAMAVQTPVPTAAGGSGDRSLEEALGALMAALDDYRGQFPELQGLEQEVTRLESLLMQRQGLTRSRASSLSITVEHALESFSFLNEDEDEDNDVPGDRPPSSPEAGAEDSIDSPSARPLSTGCPALDAALVRHLYHCSRLLLKLGTFGPLRCQEAWALERLLREARVLEAVCEFSRRWEIPASSAQEVVQFSASRPGFLTFWDQCTERLSCFLCPVERVLLTFCNQYGARLSLRQPGLAEAVCVKFLEDALGQKLPRRPQPGPGEQLTVFQFWSFVETLDSPTMEAYVTETAEEVLLVRNLNSDDQAVVLKALRLAPEGRLRRDGLRALSSLLVHGNNKVMAAVSTQLRSLSLGPTFRERALLCFLDQLEDEDVQTRVAGCLALGCIKAPEGIEPLVYLCQTDTEAVREAARQSLQQCGEEGQSAHRRLEESLDALPRIFGPGSMASTAF

SEQ ID NO: 1713 - DNA, 7039 bp, Homo sapiens
agagaatccagacagctcaccctgctgggcggcaggtgatgctgcactacctgctaccatggatgaacaacatcgagctggtggacttaaaacctctccccacagcaaggcgacatgatgaagatgaagatgattccttaaaagaccgagaacttatggtgactagtaggcgctggttacggggagaaggatggggatctccacaagccactgcaatggttttgaacaatctgatgtatatgacagcaaagtatggcgatgaactggcctggtcggaggtggagaatgtgtggaccacacttgcagatggctggcccaaaaacctgaaaataattttgcactttttgatcagcatttgtggggtgaatagcgaaccaagcctcttgccttacgtgaagaaggtcattgtatatttaggtagagataaaacaatgcagttgctagaagagctggtgagtgagcttcagctgaccgatcctgtcagttcaggggtcactcacatggataatcccccgtattatcgcatcacttccagctataaaatcccttctgtcacctcaggaactacttccagtagcaatacaatggtagctcccacagatggcaatcctgataataagcccattaaagagaatattgaagagagctatgtgcacctggacatttacagtggactaaacagtcatttgaatcggcaacatcacagactagaatcccgatacagtagcagctctggaggatcttatgaagaagaaaaaagtgattcaatgccactttattctaattggcgactgaaagtgatggagcataaccaaggagagccactgcccttcccaccagctggaggctgctggtcaccactggtggattacgtgcctgaaacgtcatcacctggattacctcttcacaggtgtaacatagcagtgatccttttgactgatctcatcattgatcatagtgtgaaggtggaatggggaagctacctccatcttcttcttcatgcaatttttatagggtttgaccactgccaccctgaggtgtatgaacattgtaaacgcctgcttctgcacttattaatagtaatgggacccaatagtaacatccgaactgttgcttctgtccttctcaggaacaaggagtttaatgagcccagggtgcttacagtcaaacaagttgcacacttagattataatttcacagcaggcattaacgattttatacctgattaccagccctcccctatgactgactcagggcttagctcaagttctacctcttctagtatcagcttaggaaataacagtgctgccatttcacatctgcacaccactatcctcaatgaggttgacatctcagtggagcaggatggaaaagtcaaaaccctcatggaattcattacctcaagaaaaagagggcccctttggaaccatgaggatgtttctgccaagaatcctagcataaagagtgctgaacagttaactacatttttgaaacatgtggtttctgtttttaagcagtcaagctcagaaggaattcatctggaacatcatcttagtgaagttgctctgcaaacagcactttcctgttcttctcgacactatgctgggagatcctttcagattttcagggccctaaagcagcctctcactgcaactacactttctgatgttctctccagacttgtagaaactgtaggggatccaggagaagatgcacagggatttgtgattgagcttcttctcacattggaatctgcaattgatactttggctgaaaccatgaagcattatgatcttctttctgccctttctcaaacctcatatcatgatcctataatgggaaacaagtatgcagctaacaggaaaagcactggacaactcaatctaagcacaagtcccattaatagtagcagttatttgggatataacagtaatgcaagaagtaactctttgagattaagtttgattggtgaccgacgaggtgaccggcggcggagtaacacactggatataatggatggacggataaaccatagcagtagtttagcaaggactagaagcctttcctctctaagagagaaaggaatgtatgacgtgcagtccactactgagcctaccaacttgatggccaccattttttggatagcagcatctttattagaatcagattatgaatatgaatacctcctggctctcaggcttctcaacaaactgcttatccatttgcctttggataaatcagagagtcgagagaagattgaaaatgtacaaagcaaattgaaatggactaattttccaggacttcagcagctcttccttaagggttttacctcagcatctacacaagaaatgaccgtgcacctcctcagtaaactcatttctgtctccaaacatacattggtggatccttcccaattgtcaggctttcctcttaacatcctttgcttattgcctcacttaatccagcattttgacagcccaactcagttttgcaaagaaacagctagtcgaatagcaaaggtttgtgcagaagaaaaatgcccaacacttgtcaatctggcacacatgatgagtttgtacagtacacacacgtattccagagactgttctaactggatcaatgtcgtgtgcagatacctgcatgactccttctcagatacaacatttaatcttgtgacttatcttgcagagctgttagagaaaggattgtccagtatgcagcaatcattactacagattatttatagtctattgagtcatattgacctgtctgcagccccagccaagcagtttaatctggagatcataaagattattggcaaatatgtacagagtccttactggaaggaagcccttaacatattaaagctggtggtgtcacgctctgcgagtcttgtcgtacccagtgatatccccaagacctatggaggagatacaggttctcctgaaatatccttcactaaaatttttaataatgtttctaaggagttgcctgggaagaccttagattttcattttgatatatctgagacaccaattattggaaacaaatatggtgatcagcacagtgcggctggaagaaatgggaaaccaaaagttattgctgtcactagaagtacttcctcaacttcttctggttctaattctaatgccttggttcctgttagttggaaaaggccacagttatcacagcgaagaacaagagaaaagctaatgaatgtgctttctctctgtggtccagaatctggcctcccaaagaacccatcagttgtattttcttctaatgaggatttggaagtcggtgaccaacagactagcctaatttctacaacagaagacataaatcaagaggaagaagtagctgtggaagataatagcagtgaacaacagtttggtgtttttaaggattttgactttttagatgttgaattggaagatgcagagggtgaaagtatggacaatttcaactggggagttcgcaggcgctcactggacagtattgacaaaggggacactccatccctccaggagtaccagtgctctagtagcacccccagcctgaacctcaccaatcaggaggatacagatgagtcctcggaagaagaagcggcacttacagcaagccagatactctcacgcacacagatgttaaacagtgattctgccactgatgaaacaataccagaccatcctgacttacttctccagtctgaagattccactggcagcatcacaacagaggaagtgcttcaaatcagggatgagaccccaactttggaggcttctctagataatgctaacagccggctgcctgaggatacaacttcagtattaaaggaggaacatgttacaacctttgaagatgaaggatcctatataattcaagaacagcaggaatctcttgtgtgtcaaggaattcttgatttagaagaaactgaaatgccagagcctctagctcctgaaagttaccccgagtcagtctgtgaagaggatgttaccttagctctgaaagagctagatgaaagatgtgaagaagaagaagcggatttctccggactgtctagtcaagatgaagaagagcaagatggttttccagaagtacagacgtcgcctctgccgtcaccatttctttctgccatcatagccgcctttcagcccgtggcatatgatgatgaagaggaagcctggcgctgccacgtcaatcagatgctgtctgacaccgacgggtcctctgcagtgtttacttttcatgtgttttctaggctgtttcagacaattcaaagaaagtttggagaaataactaatgaggcagtcagctttcttggtgatagtctgcaacgcattggtaccaaatttaaaagttccttggaagtgatgatgctgtgttcagaatgcccaacagtctttgtggatgctgaaacactgatgtcatgtggtttgctggaaacactcaagtttggtgttttggagttgcaagaacacctggatacatacaatgtgaaaagagaagccgctgagcagtggctagatgattgtaagaggacatttggtgccaaagaagacatgtataggataaacacagatgcacaagtaagtaaaacaatgcatgaattggagctctgccgaagattatacaaattgcattttcaattgctgcttctgttccaggcctactgtaaacttatcaaccaagtaaatacgataaaaaatgaagcagaggtcatcaacatgtcagaggaacttgcccaactggaaagtatcctcaaagaagctgagtccgcttccgaaaacgaagaaattgacatttccaaagctgcacaaactactatagaaactgccattcattctttaattgaaactttgaaaaataaagaatttatatcagctgtagcacaagtcaaagctttcagatctctctggcccagtgatatctttggcagttgtgaagatgaccctgtacagacactgttacatatatatttccatcatcagacgctgggccagacaggaagctttgcagttataggctctaacctggacatgtcagaagccaactacaaactgatggaacttaatctggaaataagagagtctctacgcatggtgcaatcataccaacttctagcacaggccaaaccaatgggaaatatggtgagcactggattctgagacacttcaggcctttaggaaagaaactaaactgaagatgatgaagaatattaaccaagcaccttttatggacccttgcattcactgataactttctggcagcatctactttttagtgtaactaatgtcaaactgtatcatcaaaaacaaagatctgaaagaaaaaaacatctgatattttaacagctgccaatatctcccacaataactgcgtgaagaaggaattttttaattacttaacctacgtgaaaagaaaagggctaaaagtgatgcctacaaatacattactttctggggaaagaaaagaattccaagaatgtttgcaataatggcctccaatactgaaacaaccaaaagcaggtgaaatgaggctgaaatcaaggctgtttcattttagctgaagacctgcaaagctgcttggatttctagcagttgaaaacctaacctgcaattgatgcttaatcatccatccacatgaacatgcagtcagctatacgcatcaagactcgtttgcaaaaaccattgatttttcagtatgtgggataagggtttgggtttttttgttttttggtctgtataaggaattatgtgtgtgtgagttgggatgtatggatatgtgatagtcatattttcaaggtatggatgtttggtgataacgtctcagagcatgcctaaaagagcactgcaagattatttttgaagaaatgttattttattagatctaactcttcatagtatgtaaatgttagaacattttaataatattttaaaactgggctttcccagtatttcaaaaagaaataatatatctgttaacgttattggaatgctgctcagttctctgatcagtgcttatgttatgattgttgataactaaccaaagtagatgcctgcagagactttaaaatgtaaaataaagatgtatgctgcctgtcagctattctcattagaaaagttttaacttattttactccatatagaaactgtagagactaaaaccagttattttcttgtacatttgtgccatgcactgttgttatacaagaataggtgtacaaagctaaagaaaaattgtggtcattgatgatggaatatatgacttgcaggctttgaagtctgcagaattcaagaaaagagctgcaaatgcatttttgtatctttattcaggactcacatgctttaccctaaagaaacctggggctaggggaaatgaaaggaagcctgaagactgactaccaaaacatgcaatatacttattcactgtctaagtctgtagtataacatgaactggagtctctatccttttctaaaatcgcattttgtaagaaaagaaagaaaaaaaaaaaaaaagaatgtagtcccacaactcctgatttgaaagaaacaccttgtattttttatatacatctcttatccactgtgacttttcttttaaactgggctctgtgattccagagtttagaatgtagaaatgaaatgcttagctttaccttttcttggggggtgtggaccctgccagaaatgtaattacgtatgctcaagtgcattaattgaaggcactgtgcacaccattggactgctgaccacagttaaacatttccagtaaaatttcgtaactggtcacagctcattcataatcactgtattttttgaccctgataaagacaattattttgatggtgttctggtactgtaattggtatcctttaaattatttaaaacttttgggtgtggggcaggcagagagggatggtgtccagagatacatcacactttacatcctatcttactgtcctctgtttttcttaccctccttacatcctttttgttaaaaataaaaagcattgtagctgttggtttgtgttgtattt

SEQ ID NO: 1714 - protein, 1260 aa, Homo sapiens
MEFITSRKRGPLWNHEDVSAKNPSIKSAEQLTTFLKHVVSVFKQSSSEGIHLEHHLSEVALQTALSCSSRHYAGRSFQIFRALKQPLTATTLSDVLSRLVETVGDPGEDAQGFVIELLLTLESAIDTLAETMKHYDLLSALSQTSYHDPIMGNKYAANRKSTGQLNLSTSPINSSSYLGYNSNARSNSLRLSLIGDRRGDRRRSNTLDIMDGRINHSSSLARTRSLSSLREKGMYDVQSTTEPTNLMATIFWIAASLLESDYEYEYLLALRLLNKLLIHLPLDKSESREKIENVQSKLKWTNFPGLQQLFLKGFTSASTQEMTVHLLSKLISVSKHTLVDPSQLSGFPLNILCLLPHLIQHFDSPTQFCKETASRIAKVCAEEKCPTLVNLAHMMSLYSTHTYSRDCSNWINVVCRYLHDSFSDTTFNLVTYLAELLEKGLSSMQQSLLQIIYSLLSHIDLSAAPAKQFNLEIIKIIGKYVQSPYWKEALNILKLVVSRSASLVVPSDIPKTYGGDTGSPEISFTKIFNNVSKELPGKTLDFHFDISETPIIGNKYGDQHSAAGRNGKPKVIAVTRSTSSTSSGSNSNALVPVSWKRPQLSQRRTREKLMNVLSLCGPESGLPKNPSVVFSSNEDLEVGDQQTSLISTTEDINQEEEVAVEDNSSEQQFGVFKDFDFLDVELEDAEGESMDNFNWGVRRRSLDSIDKGDTPSLQEYQCSSSTPSLNLTNQEDTDESSEEEAALTASQILSRTQMLNSDSATDETIPDHPDLLLQSEDSTGSITTEEVLQIRDETPTLEASLDNANSRLPEDTTSVLKEEHVTTFEDEGSYIIQEQQESLVCQGILDLEETEMPEPLAPESYPESVCEEDVTLALKELDERCEEEEADFSGLSSQDEEEQDGFPEVQTSPLPSPFLSAIIAAFQPVAYDDEEEAWRCHVNQMLSDTDGSSAVFTFHVFSRLFQTIQRKFGEITNEAVSFLGDSLQRIGTKFKSSLEVMMLCSECPTVFVDAETLMSCGLLETLKFGVLELQEHLDTYNVKREAAEQWLDDCKRTFGAKEDMYRINTDAQVSKTMHELELCRRLYKLHFQLLLLFQAYCKLINQVNTIKNEAEVINMSEELAQLESILKEAESASENEEIDISKAAQTTIETAIHSLIETLKNKEFISAVAQVKAFRSLWPSDIFGSCEDDPVQTLLHIYFHHQTLGQTGSFAVIGSNLDMSEANYKLMELNLEIRESLRMVQSYQLLAQAKPMGNMVSTGF

SEQ ID NO: 1715 - DNA, 1799 bp, Homo sapiens
ccggaaggcacggcgctcagctcaggaccgcgcgccgtggtctgaggtccgcggcagggtcccgcatggcggcgcacaggaagcacgtgtttgtggagaaggtgctgcagagactttttcctcctgttccaagtggccaaggaaagagggaaccccagacgctggccgtccaaaatccaccaaagaaagtgacctctgagaaagtgagccagaaacatgctgagcctttgacagacactggctctgagaccccgactgcccgacggctctacactgccagcgggcctcctgagggctacgtcccctgttggccggagcccagcagctgtgggagccccgagaacgcctccagcggggatgacacagaagatcaggatcctcatgaccagccaaagagaagaagaattaggaagcataaatcaaagaaaaaatttaaaaatcccaataatgttcttatagaacaagcagaattagagaaacagcagagtctgttacaggagaaatctcagcgacagcacacagatggcaccacaataagcaaaaataaaaaaaggaaactgaaaaagaaacagcaaattaaaaggaagaaagcagccggcttggcagcaaaggctgctggtgtcagtttcatgtaccagcccgaggacagcagcaatgaaggggaaggcgtgggagaggcttgtgaggaggatggtgtggacaccagcgaggaagacccgacactggccggggaggaagacgttaaagataccagggaggaagatggtgcggacgctagcgaggaagacctgacacgggccaggcaggaagagggtgcggacgccagtgaggaagatccgacaccggccggggaggaagacgttaaagacgccagggaggaggacggtgtggacaccattgaggaagacctgacacgggccggggaggaagacggtaaagacaccagggaggaggacggtgcggacgccagcgaggaagacccgacatgggctggggaggaagagggtgcagactccggggaggaggacggtgcagacgccagcgaggaagatgatacaattaccaatgaaaaggcacacagtattctaaattttttgaagtcaacacaggaaatgtatttttatgacggtgtctccagagatgcagcttcagctgccctcgcagatgccgctgaggagctgctggaccgccttgcgtcacacagcatgctgccctcagacgtgtccatcctgtaccacatgaaaacgctgctgctcctgcaagatactgagagattgaagcatgctctggaaatgttcccagaacattgcacgatgcctcctgaccatgccagagtaatctcagctttctttagttactggatcacacatatccttcctgagaagagcagtgactaaaatggaatatctctttaagaacagctcctctttaacaaaaaaacttaaaagacaaatgtgagatgggcttagagttagttctctgggaacttgaaagacatttatgccatattatttattcacgtgtttgttcctggtgggcaagatgccatctgaggcttcagatgagaaattggggtaaaatggaaatttttcacttatttgcaattatatatatcttgaattactacataaaacttgattctgtttctctacttattgtaaaaattgaaaatggacattctgttaagttaaatgtatagtttgaagctcatatatttttatgaagttttgaatcaccttgtatctgaaagtctctgctttaagaatgctttctgggtattaaaatgttctagtttaagt

SEQ ID NO: 1716 - protein, 443 aa, Homo sapiens
MAAHRKHVFVEKVLQRLFPPVPSGQGKREPQTLAVQNPPKKVTSEKVSQKHAEPLTDTGSETPTARRLYTASGPPEGYVPCWPEPSSCGSPENASSGDDTEDQDPHDQPKRRRIRKHKSKKKFKNPNNVLIEQAELEKQQSLLQEKSQRQHTDGTTISKNKKRKLKKKQQIKRKKAAGLAAKAAGVSFMYQPEDSSNEGEGVGEACEEDGVDTSEEDPTLAGEEDVKDTREEDGADASEEDLTRARQEEGADASEEDPTPAGEEDVKDAREEDGVDTIEEDLTRAGEEDGKDTREEDGADASEEDPTWAGEEEGADSGEEDGADASEEDDTITNEKAHSILNFLKSTQEMYFYDGVSRDAASAALADAAEELLDRLASHSMLPSDVSILYHMKTLLLLQDTERLKHALEMFPEHCTMPPDHARVISAFFSYWITHILPEKSSD

SEQ ID NO: 1717 - DNA, 2080 bp, Homo sapiens
ggcgcgggtttggtggcgcgtttcagcgaagtcgcacgtgaaggatagcagtggcctgagaaagacccagtcatggcagcctccagcatcagttcaccatggggaaagcatgtgttcaaagccattctgatggtcctagtggcccttatcctcctccactcagcattggcccagtcccgtcgagactttgcaccaccaggccaacagaagagagaagccccagttgatgtcttgacccagataggtcgatctgtgcgagggacactggatgcctggattgggccagagaccatgcacctggtgtcagagtcttcgtcccaagtgttgtgggccatctcatcagccatttctgtggccttctttgctctgtctgggatcgccgcacagctgctgaatgccttgggactagctggtgattacctcgcccagggcctgaagctcagccctggccaggtccagaccttcctgctgtggggagcaggggccctggtcgtctactggctgctgtctctgctcctcggcttggtcttggccttgctggggcggatcctgtggggcctgaagcttgtcatcttcctggccggcttcgtggccctgatgaggtcggtgcctgacccttccacccgggccctgctactcctggccttgctgatcctctacgccctgctgagccggctcactggctcccgagcctctggggcccaactcgaggccaaggtgcgagggctggaacgccaggtggaggagctgcgctggcgccagaggcgagcggccaagggggcccgcagtgtggaggaggagtgagccggatgccccacacaccgccagtgtcataccaaagagctgagctgcttcggggccatgcagccctcctgccagccccctgcccttttcttgccctgtctctgaaccttcagaacattgatccttgccgcagccccactagccaagagaaacagagaaagaccattccccctgcctgtccttgcggccctgtcttctgaggttctctgtctggggttggctctcttaaccctttctctgctcccagcctgcctcaccagggaaggttggaggggcctccctctggcttctgcatctgcgccagcaaacatcactgccgttggtctctcatgacttaactggcttccctctgctgctgccttggcttcctcctaatgctcgtgctctcctgtccttctgaagttgctccttggccaaatctccagctcccttcttgttttcctcatcctcctaccctgtactcccaccaaaccatggtcctttaaggcacgctcctgtcctcctcattgcccagcagtagggaggggcaggggtaaggggacctgaggataaagggtggggaaacagggtcccctgaggcctgtgggggctgcaggggaggaggatgtaccttgtgtctctttcaagtgccttaatccgagccagcagggccttctgcttgcctgctgccatactgtatgtaggaaagtgttctgtggctgctttgtgtcaagaaaagagcagtcactctcagaatcttgattccccatcagccaaagcaaaagatggctgctgctttgtaggcatgtgcctgcaagtgggaccttgctgggcattatatgccctgtgggggtttcagagaccctgaaagaggagggaggacccgcctccttgtctgcacaactgcatgcacttctctccccatcgctccacaacctgaaaccgagaaggagttgctgaccagtgcccaccccggcagcccgggaggaacacaggcagctcctttcccttcacgtggtctgcagagagcagggtgagctgccagctgcccctctccaccagggtaccctgtcttggtggttaggggccacttttcctttgaggctctagtggaggtggatgtccttctctgccaggcttggcacatgatgtgaagaataaatgcccaattcttactgttcaggtttgatgtggaatcacagctgcagtgatatatattttttatcagtgcttggttggttttaaataaagtgcacgctattttattatcttgttctgaataaaatgtatttactcc

SEQ ID NO: 1718 - protein, 243 aa, Homo sapiens
MAASSISSPWGKHVFKAILMVLVALILLHSALAQSRRDFAPPGQQKREAPVDVLTQIGRSVRGTLDAWIGPETMHLVSESSSQVLWAISSAISVAFFALSGIAAQLLNALGLAGDYLAQGLKLSPGQVQTFLLWGAGALVVYWLLSLLLGLVLALLGRILWGLKLVIFLAGFVALMRSVPDPSTRALLLLALLILYALLSRLTGSRASGAQLEAKVRGLERQVEELRWRQRRAAKGARSVEEE

SEQ ID NO: 1719 - DNA, 1974 bp, Homo sapiens
ggcggtgctgcagggctggtccgggaggtgacgaccggcttcggagagtctatcatggcagctcggactggtcatacggccttgagaagggtagtctcgggatgccgtccgaagtcggcgacagcggccggggcgcaggcgcccgtgcggaatggcagatatttagcttcctgtggtatactgatgagcagaactcttccactacatacctcaattttgcctaaggagatatgtgcacgaactttcttcaaaatcactgcaccattaataaacaaaaggaaagaatattcagagagaagaattttaggatattcaatgcaggaaatgtatgatgtagtatcgggagtggaggattacaagcattttgttccttggtgcaaaaaatcagatgttatatcaaagagatctggatattgtaaaacaagattagaaattggatttccacctgtgttggagcgatatacatcagtagtaaccttggtgaaacctcatttagtaaaggcatcttgtactgatgggagacttttcaatcatttggagactatttggcgttttagcccaggtcttcctggctacccaagaacttgtaccttggatttttcaatttcttttgaatttcgatcacttctacattcccagcttgccacactcttttttgatgaagttgtgaagcagatggtagctgcctttgaaagaagagcatgtaagctgtatggtccagaaacaaatatacctcgggagttaatgcttcatgaagtccatcacacataaaggcaaaaaagaactggtgccacctgcttctgactttagtttgttcacttttaggaagtattttcatgacatgttttcagaagccagaaagcatttgttaaacgcagctttggttataaacctgcaccattgaaaatttgcacatagaatatagactcacttgtacatagaattatttcttcaagtataattcaaaataatatggacattatcatgttctgcattacaataatgggatgtcatcaccattgctagaatactggcatgattcttctgagcagaagttgaaactgtaaatttaaaccttttaattatcaccttacctgaaagaggttagttaagatattcacacagtatgtattatattaaccatatcacacttaagttattaaattcagactatttgtaacttattgttatagggcctgccgtatggcttaggatatttgagtaatcatatatttaaagtaaaaactttgggctgggcacagtggctcacacctgtaatcccagcacttggggaagctgaggtgggcagatcagttgaggtcaggagttctagaccagcctggtcaacatggcgaaaccccatctctactaaaaatacaaaaattagctgggcgtggtggcacacacctgtaatcccagttacttgggaggctgaggcacaagaatcgcttgaacccgggaggcggaggttgcagttagccaagatcgccctgctgcactccagcctgggcaacagagggagactctgtctccaaaaacaaaaacaaaaactgttagtgaaggttccctgggacttttgatattttaaaaattgttcttatgactagtagataaattcattgccataatgaggctagctcccagataaacagtgtattttcttctttttttttttttttttggtgagtggtccagagctttaagctacttttccagtagtttgccactttctccgaggtagtttggctgctctttcagtaatgctaattgtgtgtcaaattttgtctacaacagtaggcaacagatgaagataagttggttgaatgtctccagcactatgcatccctattttctatttattgtgtacactcactttcagtaatgtgtttcaaactggtattttttaaaaaacaaatcaatgtaaggactgaagttgaagtagcaatgtaataaagttaatttgtttattttttg

SEQ ID NO: 1720 - protein, 238 aa, Homo sapiens
MAARTGHTALRRVVSGCRPKSATAAGAQAPVRNGRYLASCGILMSRTLPLHTSILPKEICARTFFKITAPLINKRKEYSERRILGYSMQEMYDVVSGVEDYKHFVPWCKKSDVISKRSGYCKTRLEIGFPPVLERYTSVVTLVKPHLVKASCTDGRLFNHLETIWRFSPGLPGYPRTCTLDFSISFEFRSLLHSQLATLFFDEVVKQMVAAFERRACKLYGPETNIPRELMLHEVHHT

SEQ ID NO: 1721 - DNA, 3052 bp, Homo sapiens
agaggaggagggaggaagaaaaaagacgaggaggacaggggcggggggcgggaggcttgccaccttcagcccccccgcgaacgcccaaggtgcacacatcttgaccaactcagcagcaaggtggattttctttgtgtttaaagaaaaaaaatgtccctgtgtctgtagagatgatttgcagttcagcccggctgaagctgaccgaatgagactatgggctgtgcctccgccaagcatgttgccactgttcaaaatgaagaggaagcccagaaagggaaaaactaccagaacggagatgtgtttggcgatgagtataggatcaaaccagtggaagaggtcaaatacatgaaaaatggggcagaagaagagcagaaaatagcagccaggaaccaagaaaacttggaaaaaagtgccagctcaaatgtaagacttaaaactaataaagaggttccgggattagttcatcaacccagagcaaacatgcacatctctgaaagccaacaagaattcttcagaatgctggatgaaaaaattgaaaagggtcgggattactgttcggaagaagaggatatcacatagcaccaattttaccactcaaaccaggagctactactgtgtaaataggttacaccccagttgaaatctttgcaaaggtcggttctattcagcgaacagcactatagcaaaagaagatcgttccatattgtacgccccattaaattacagtgtttcttaatgaacttgcaaaggaatattgctaaaaacaaacaaaaaaaactgttatcgaactttctttgttgctgctagttaaaacttgttgcaacttttcacttctcttgtgtccaggtatgcagcaaaattctgcaatttcaccttaaagatactgttggttttacagatgctctccaacctattttctataagatgaggtagtggtgaactcagataacaaacttctcttctaaactggttctgcttctaagacaagcatctcctgccctctctccttcctccccatctctcgcacgcagtctagagatggactgagccttgcttctcactggcagtgttgagctttggagatgggatggttgctatgccaagccttgtttctctgctcagaagaagtagagaagctattatcaattaaaagcatgctgtgatgtgactcctggaagtgacgtaggagtgagtggcaggttgtttgatttaataggtatcttaatcaagaattaagcttgcaacattggctttgctcagatgcagatggaagtgtgatcacaatcattttgaatccctcttcctcacttttttttctaagaaaataaacattttactgtttttatggatccttgtcttctcccattcatccagctcagtgttttaagatgatcctgggtgcagaagttgagccctcctttgcattgacactgataattagcctatagggctccctacccttccattaagaatctaccaagcattagcaaggctgaaagtggtctaagaggtgaggggacatcctatgactttttaggaaggcctgaaaccaccttgttacctttcattttgttagcaaataaaccatcctattttgtaactctcccccttcaaaatgctacatgagccttgccacttcctttttctcttacttccagcacactagacatagcaaaagtgtttgcctactcaaaaacataatacttttatgctgatgatggtatttggagatgtgaaagccaaaagcccctggcagtggtggggaatgttgactgagtgttcagcagagtttatttttccatactatatgaagagaatgatctcttctcaaagacagaagtgatatttttaacaaatattgtcacaagtaaatagcaatcaaaaggagaaaataacttttgtatttttttaatgtgtttgatagctttgacgagggttctctttgttactttcaggggagggcatcctattaaatgccacgccagcagtccgggtctgggtttgtcccacaaaatcacaggagcactgtatgttcctctcttttggagttgtgactttgaagggcctcaatattagccacactgccgcctgcagaaggtggagagttaagatgttctatgtcaatttgctcttgccgaaaagatgagcctcgattttaaaatctatccacatccaactgatggcaccattgatgtgcaaataatgagattccctatctccttttagacctgggacggcaaaagggaagggaaggaaacttagcagagtgctattgactatagattcacatattagcaacaaaatcccgtaattcttttggccaacagcagctattttggggagcagctgtggctgttacataaatagagatgcagccaaaattttaggccttttatcctgcttctagcagaaaaatgcagggagagtcaagtagtctagggtttcaggttgcctcccctcatatggtttttggccaagtgactaaaacagttttccacaactgtaaacaaactgctaagccccacctcaaacttgttcactggggactttgcttaccgttctgtgggtgaccttttccgggatttcttgttcttatcaagcaagaattaagcacatgctaaacgtcttccatttgacttctctactcggtgtctcagacagtgtcttcccagaaaaccaccaccctctacccaaagatgaaacatgctcatgtcatttttctcatggtcacatttaacagttttgacatgttatacttgcgcatagatccaagcgtttcttgggaacctgacttttgagtgtttaataaagccggaagtggtgttgccctgaaccagcagattttcacctgggttctggctccggtgtttaacactggatacatctttgatgtgcgaaagtgagttcatcttcagacacatttggtacatccagaaatagatccaagaaatggggtggttgagtgggtccgcacgaaatgcttgattatgtcagcaacacccaacactgtctgttttccatttgttggttttaatcataaaattgtcaagtg

SEQ ID NO: 1722 - protein, 121 aa, Homo sapiens
MGCASAKHVATVQNEEEAQKGKNYQNGDVFGDEYRIKPVEEVKYMKNGAEEEQKIAARNQENLEKSASSNVRLKTNKEVPGLVHQPRANMHISESQQEFFRMLDEKIEKGRDYCSEEEDIT

SEQ ID NO: 1723 - DNA, 2116 bp, Homo sapiens
cttacggcggccggccttctttgtaggcctggcaccgtagaggtagaggagctacattggccgcgtcccctgtccctctgccctcttgcccatctgcccaaacttttgtatttgatctctgttttgatgtcgaaccccaaagcactgtaattggggggggcgggggggggggtggaacctgcggacctgagagcagcgcgcgtgcgcacgacacgcgctgtgcgccggaagagcacgcccagtccgggctgcgcggaggaagcgctggggtcccggagggcgggggtggcggcgccggaggtcgccatggctaccgagcccgaagccgcggagccggtggtgccttcgctcgtggatcgatacttcactcgctggtacaaaccggatgtcaaaggaaaattttgtgaggaccactgtatactacagcactctaaccgaatatgtgtcatcacattggcagaatctcatccagttcttcaaagtggaaaaacaattaaaagcatttcctatcagatcagtaccaactgtagcagacttcagaacaaggtctctgggaaatttaagcggggggcacagtttctaacagagcttgcacctctctgtaagatttactgctcagatggtgaagaatatactgtgtctagttgtgttagaggacgtttgatggaagtgaatgaaaacatcctccataagccatctattcttcaagaaaagccatctactgaaggctacattgcagttgtgttacccaaatttgaagaaagtaaaagcataacagaagggttactgacacaaaaacaatatgaagaagtcatggtgaaacgcattaatgccacaacagctacgtcatgaggattgacatggaacaaaaagcaaagtgggattcttgttacctggcctaaaccatcagggtactaaaggagaagaaccagtatatgtaaagcatacctaacagccagccatatgcaggggaggcctagtgcttcacttagttttccctctctgtcttcataatgagccttggttcccatttgtctacagcctgccagatctggcctgcccatgtactcacactgttctcttgcatctctctaacaactggcatgcaaggcatgtttttctgattaaaaacaaacaaagctctttgaagaagatttagaaaatacagaagagttttaagtagccaagtaaaaataatttacccatcatcccataatccagaagtaaatacatttgacccttgagcaacataggtttgaactgcaagggtccacttatgcatggactattttcaactataaacgagtcaaaaatatatcattaaccaaacacgaaacccacttatagagcaggttcatatactcaggttccaaagggccaactgcaggacttgagttctcacgtatggatttgggtatatgtggaagttcctggaaccaatcccctatgtaaaccaagggataactactacattttaacctacttctgtttgaacatatggtatggttattgcttttgcctcgttttcctaacagtttgaagtttaaaaaaacctaacccacctttcttacccagtcttctataatgtgcctaccaaaaagcctagtcctagcccatctgcctcaactcctctcccttttaggttgtagggaagaggccggagtgtagagtatattatatcttctgtcccccttatgccaacaagatggccttcccctctgaaacaaagtaaaactgcaacactgtgacttcttaaatgagggatatgtgaaaaggctatgaaaaatacaaaggctttcctaggaaatgtgttataatgcagcgggaagctaattcttgaaatatgcacattatagttactcagtctcacatactctagttactggcaaagaagttactgagaatatgtcattcaaaggcataggggcctttgaatggaacaaatgctttcacatcatttaaagtaaaaaaaaacctccaacaactgtgaatttatagtttaagagtgatttacactgaatttcaaataaaaggactataaaacgtgttatttttctgtaagggctataacatacatgtcaatatcactgtttttaaataaaatatacttttatac

SEQ ID NO: 1724 - protein, 181 aa, Homo sapiens
MATEPEAAEPVVPSLVDRYFTRWYKPDVKGKFCEDHCILQHSNRICVITLAESHPVLQSGKTIKSISYQISTNCSRLQNKVSGKFKRGAQFLTELAPLCKIYCSDGEEYTVSSCVRGRLMEVNENILHKPSILQEKPSTEGYIAVVLPKFEESKSITEGLLTQKQYEEVMVKRINATTATS

SEQ ID NO: 1725 - DNA, 2666 bp, Homo sapiens
tcctcgatgccaagaagagcctgaacctcaacatcttcctgaagcaatttaagtgctccaacgaggaggtcgctgctatgatccgggctggagataccaccaagtttgatgtggaggttctcaaacaactccttaagctccttcccgagaagcacgagattgaaaacctgcgggcattcacagaggagcgagccaagctggccagcgccgaccacttctacctcctcctgctggccattccctgctaccagctgcgaatcgagtgcatgctgctgtgtgagggcgcggccgccgtgctggacatggtgcggcccaaggcccagctggtgctggctgcctgcgaaagcctgctcaccagccgccagctgcccatcttctgccagctgatcctgagaattgggaacttcctcaactacggcagccacaccggtgacgccgacggcttcaagatcagcacattgctgaagctcacggagaccaagtcccagcagaaccgcgtgacgctgctgcaccacgtgctggaggaagcggaaaagagccaccccgacctcctgcagctgccccgggacctggaacagccctcgcaagcagcagggatcaacctggagatcatccgctcagaggccagctccaacctgaagaagcttctggagaccgagcggaaggtgtctgcctccgtggccgaggtccaggagcagtacaccgagcgcctccaggccagcatctcggccttccgggcactggatgagctgtttgaggccatcgagcagaagcaacgggagctggccgactacctgtgtgaggacgcccagcagctgtccctggaggacacgttcagcaccatgaaggctttccgggaccttttcctccgcgccctgaaggagaacaaggaccggaaggagcaggcggcgaaggcagagaggaggaagcagcagctggcggaggaggaggcgcggcggcctcggggagaggacgggaagcctgtcaggaaggggcccgggaagcaggaggaggtgtgtgtcatcgatgccctgctggctgacatcaggaagggcttccagctgcggaagacagcccggggccgcggggacaccgacgggggcagcaaggcagcctccatggatcccccaagagccacagagcctgtggccaccagtaaccctgcaggagatcccgtgggcagcacgcgctgtcccgcctctgagcccggccttgatgctacaacagccagcgagtcccggggctgggaccttgtagacgccgtgacccccggccctcagcccaccctggagcagttggaggagggtggtccacggcccctggagaggcgttcttcctggtatgtggatgccagcgatgtcctaaccactgaggatccccagtgcccccagcccttggagggggcctggccggtgactctgggagatgctcaggccctgaagcccctcaagttctccagcaaccagccccctgcagccggaagttcaaggcaagatgccaaggatcccacgtccttgctgggcgtcctccaggccgaggccgacagcacaagtgaggggctggaggacgctgtccacagccgtggtgccagaccccctgcagcaggcccaggtggggatgaggacgaggacgaggaggacacggccccagagtccgcactggacacatccctggacaagtccttctccgaggatgcggtgaccgactcctcggggtcgggcacactccccagggcccggggccgggcctcaaaggggaccgggaagcgaaggaagaagcgtccctccaggagccaggaagaggttccccctgattctgatgataataaaacaaagaaactgtgtgtgatccagtaaggcctcaggcccaggcccaaggccaagtgagagagcccaggccacaggacatgctgccattctgccaagagaggctcttctgggggccaggctgggactgggccccggaaaccaaaactccgtgccttacccagccggggccctcctggagccttcttggggtgttgtggctgggaacccgacaggcaccagtgccctgccaggcctggtgccctcctggaccgcctgcacgtgccagcctcccacctgcttcctaaaggcaaccctggcccacacccgcatgcgcccggtgcagcctgccaagggccagtcggggggtgctgcgtcctgccagtgtccaccacagctctgcctgcccttcagcccagcaaggtttaatcaaaatgcaatgctttgcaagtctttactgcttggaggtggctgagttgggggccctgggcaggggtaagctggcaggcagtgccatggcaggccagggtcccctcccatggggtctggcccccgttccagcatgtccagcccctgaagttggagtggggggcggtctgcctttgctgccactgccaggcctctgccctgcagctgaaacttggccatcacatcaacagaaaacccctcccagtgccagctgcccagcgtgggcaggccctggggacaatacaggtccacctgaggggctgcagggtgacacccagcagccgctgccccctcactgcccacccagcgagggcagcctacccgagcctgccccctgccaggtgtgtgccctgaggctggcggctggatgcgtggccaataaaaagcagacct

SEQ ID NO: 1726 - protein, 337 aa, Homo sapiens
MKAFRDLFLRALKENKDRKEQAAKAERRKQQLAEEEARRPRGEDGKPVRKGPGKQEEVCVIDALLADIRKGFQLRKTARGRGDTDGGSKAASMDPPRATEPVATSNPAGDPVGSTRCPASEPGLDATTASESRGWDLVDAVTPGPQPTLEQLEEGGPRPLERRSSWYVDASDVLTTEDPQCPQPLEGAWPVTLGDAQALKPLKFSSNQPPAAGSSRQDAKDPTSLLGVLQAEADSTSEGLEDAVHSRGARPPAAGPGGDEDEDEEDTAPESALDTSLDKSFSEDAVTDSSGSGTLPRARGRASKGTGKRRKKRPSRSQEEVPPDSDDNKTKKLCVIQ

SEQ ID NO: 1727 - DNA, 2556 bp, Homo sapiens
ctccaacgaggaggtcgctgctatgatccgggctggagataccaccaagtttgatgtggaggttctcaaacaactccttaagctccttcccgagaagcacgagattgaaaacctgcgggcattcacagaggagcgagccaagctggccagcgccgaccacttctacctcctcctgctggccattccctgctaccagctgcgaatcgagtgcatgctgctgtgtgagggcgcggccgccgtgctggacatggtgcggcccaaggcccagctggtgctggctgcctgcgaaagcctgctcaccagccgccagctgcccatcttctgccagctgatcctgagaattgggaacttcctcaactacggcagccacaccggtgacgccgacggcttcaagatcagcacattgctgaagctcacggagaccaagtcccagcagaaccgcgtgacgctgctgcaccacgtgctggaggaagcggaaaagagccaccccgacctcctgcagctgccccgggacctggaacagccctcgcaagcagcagggatcaacctggagatcatccgctcagaggccagctccaacctgaagaagcttctggagaccgagcggaaggtgtctgcctccgtggccgaggtccaggagcagtacaccgagcgcctccaggccagcatctcggccttccgggcactggatgagctgtttgaggccatcgagcagaagcaacgggagctggccgactacctgtgtgaggacgcccagcagctgtccctggaggacacgttcagcaccatgaaggctttccgggaccttttcctccgcgccctgaaggagaacaaggaccggaaggagcaggcggcgaaggcagagaggaggaagcagcagctggcggaggaggaggcgcggcggcctcggggagaggacgggaagcctgtcaggaaggggcccgggaagcaggaggaggtgtgtgtcatcgatgccctgctggctgacatcaggaagggcttccagctgcggaagacagcccggggccgcggggacaccgacgggggcagcaaggcagcctccatggatcccccaagagccacagagcctgtggccaccagtaaccctgcaggagatcccgtgggcagcacgcgctgtcccgcctctgagcccggccttgatgctacaacagccagcgagtcccggggctgggaccttgtagacgccgtgacccccggccctcagcccaccctggagcagttggaggagggtggtccacggcccctggagaggcgttcttcctggtatgtggatgccagcgatgtcctaaccactgaggatccccagtgcccccagcccttggagggggcctggccggtgactctgggagatgctcaggccctgaagcccctcaagttctccagcaaccagccccctgcagccggaagttcaaggcaagatgccaaggatcccacgtccttgctgggcgtcctccaggccgaggccgacagcacaagtgaggggctggaggacgctgtccacagccgtggtgccagaccccctgcagcaggcccaggtggggatgaggacgaggacgaggaggacacggccccagagtccgcactggacacatccctggacaagtccttctccgaggatgcggtgaccgactcctcggggtcgggcacactccccagggcccggggccgggcctcaaaggggaccgggaagcgaaggaagaagcgtccctccaggagccaggaaggcctcaggcccaggcccaaggccaagtgagagagcccaggccacaggacatgctgccattctgccaagagaggctcttctgggggccaggctgggactgggccccggaaaccaaaactccgtgccttacccagccggggccctcctggagccttcttggggtgttgtggctgggaacccgacaggcaccagtgccctgccaggcctggtgccctcctggaccgcctgcacgtgccagcctcccacctgcttcctaaaggcaaccctggcccacacccgcatgcgcccggtgcagcctgccaagggccagtcggggggtgctgcgtcctgccagtgtccaccacagctctgcctgcccttcagcccagcaaggtttaatcaaaatgcaatgctttgcaagtctttactgcttggaggtggctgagttgggggccctgggcaggggtaagctggcaggcagtgccatggcaggccagggtcccctcccatggggtctggcccccgttccagcatgtccagcccctgaagttggagtggggggcggtctgcctttgctgccactgccaggcctctgccctgcagctgaaacttggccatcacatcaacagaaaacccctcccagtgccagctgcccagcgtgggcaggccctggggacaatacaggtccacctgaggggctgcagggtgacacccagcagccgctgccccctcactgcccacccagcgagggcagcctacccgagcctgccccctgccaggtgtgtgccctgaggctggcggctggatgcgtggccaataaaaagcagacctag

SEQ ID NO: 1728 - protein, 142 aa, Homo sapiens
MQCFASLYCLEVAELGALGRGKLAGSAMAGQGPLPWGLAPVPACPAPEVGVGGGLPLLPLPGLCPAAETWPSHQQKTPPSASCPAWAGPGDNTGPPEGLQGDTQQPLPPHCPPSEGSLPEPAPCQVCALRLAAGCVANKKQT

SEQ ID NO: 1729 - DNA, 2017 bp, Homo sapiens
gagaccgagcggaaggtgtctgcctccgtggccgaggtccaggagcagtacaccgagcgcctccaggccagcatctcggccttccgggcactggatgagctgtttgaggccatcgagcagaagcaacgggagctggccgactacctgtgtgaggacgcccagcagctgtccctggaggacacgttcagcaccatgaaggctttccgggaccttttcctccgcgccctgaaggagaacaaggaccggaaggagcaggcggcgaaggcagagaggaggaagcagcagctggcggaggaggaggcgcggcggcctcggggagaggacgggaagcctgtcaggaaggggcccgggaagcaggaggaggtgtgtgtcatcgatgccctgctggctgacatcaggaagggcttccagctgcggaagacagcccggggccgcggggacaccgacgggggcagcaaggcagcctccatggatcccccaagagccacagagcctgtggccaccagtaaccctgcaggagatcccgtgggcagcacgcgctgtcccgcctctgagcccggccttgatgctacaacagccagcgagtcccggggctgggaccttgtagacgccgtgacccccggccctcagcccaccctggagcagttggaggagggtggtccacggcccctggagaggcgttcttcctggtatgtggatgccagcgatgtcctaaccactgaggatccccagtgcccccagcccttggagggggcctggccggtgactctgggagatgctcaggccctgaagcccctcaagttctccagcaaccagccccctgcagccggaagttcaaggcaagatgccaaggatcccacgtccttgctgggcgtcctccaggccgaggccgacagcacaagtgaggggctggaggacgctgtccacagccgtggtgccagaccccctgcagcaggcccaggtggggatgaggacgaggacgaggaggacacggccccagagtccgcactggacacatccctggacaagtccttctccgaggatgcggtgaccgactcctcggggtcgggcacactccccagggcccggggccgggcctcaaaggggaccgggaagcgaaggaagaagcgtccctccaggagccaggaagaggttccccctgattctgatgataataaaacaaagaaactgtgtgtgatccagtaaggcctcaggcccaggcccaaggccaagtgagagagcccaggccacaggacatgctgccattctgccaagagaggctcttctgggggccaggctgggactgggccccggaaaccaaaactccgtacccagccggggccctcctggagccttcttggggtgttgtggctgggaacccgacaggcaccagtgccctgccaggcctggtgccctcctggaccgcctgcacgtgccagcctcccacctgcttcctaaaggcaaccctggcccacacccgcatgcgcccggtgcagcctgccaagggccagtcggggggtgctgcgtcctgccagtgtccaccacagctctgcctgcccttcagcccagcaaggtttaatcaaaatgcaatgctttgcaagtctttactgcttggaggtggctgagttgggggccctgggcaggggtaagctggcaggcagtgccatggcaggccagggtcccctcccatggggtctggcccccgttccagcatgtccagcccctgaagttggagtggggggcggtctgcctttgctgccactgccaggcctctgccctgcagctgaaacttggccatcacatcaacagaaaacccctcccagtgccagctgcccagcgtgggcaggccctggggacaatacaggtccacctgaggggctgcagggtgacacccagcagccgctgccccctcactgcccacccagcgagggcagcctacccgagcctgccccctgccaggtgtgtgccctgaggctggcggctggatgcgtggccaataaaaagcagacctagcccg

SEQ ID NO: 1730 - protein, 122 aa, Homo sapiens
MLPFCQERLFWGPGWDWAPETKTPYPAGALLEPSWGVVAGNPTGTSALPGLVPSWTACTCQPPTCFLKATLAHTRMRPVQPAKGQSGGAASCQCPPQLCLPFSPARFNQNAMLCKSLLLGGG

SEQ ID NO: 1731 - DNA, 1871 bp, Homo sapiens
gcagcagccgagtctgacggcgccggttcgctgcccggtccgcccgcgatgccgtagggccaggtgagctgctgtgaaggactcattcttggtagccggcagttactggcaacttgtgagcttggtgggctcctactaacgcacctgggacaccaggctgctgggctcccctctaggcagcctcccctccaggcagcctcaccagcagctcccctgagccatggagaccccagaggtccccgtgggctcgctaatcgactttgggcctgaggcacccacctcttctcccctggaggcaccaccccctgtgctgcaggacggcgatggctccctgggggacggtgcatcagagagtgagaccactgagtctgcggacagtgagaatgacatgggcgagtcgccctcgcacccgtcctgggaccaagaccgccgttcctcctccaacgagtccttctcctccaaccagagcaccgagtctacccaggatgaagagaccctggcactcagggacttcatgcgtggctacgtggagaagatcttctctggaggggaggacttggatcaggaggagaaagccaagtttggagagtactgcagcagtgaaaatggaaaaggccgggagtggtttgctcgatacgtgagtgcccagcgctgcaactccaagtgtgtctcagaggcaaccttctaccgcctggtgcagtcttttgcagtggtgctgttcgagtgtcatcagatggatgactttgggcctgccaagaacctcatgaccatgtgcttcacctactaccacatcggaaaaccacagctgctgcccccggagtcccgggagaagcccgcgggcagcatcgactcctacctgaaatccgcaaacagctggctggccgaaaagaaggacatcgccgagcggctgctgaagaacacctcggccaggactgagaatgtcaagggcttcttcggggggctggagaccaagctgaaggggcccctggccaggaggaacgaggaagacgagaacaaaccccaggagaagcggcccagggctgtgaccgcgtacagccccgaggacgaaaagaagggggagaagatctacctgtacacgcacctgaagcaacagcccatctggtaaggccgagcccgcggcttcccgtcaccctcttactgacggggccagcagtcactccccgggatcacttctagctgcctttgtccccatcagaatggcagaattctcacactcaccagagtggcagaataaaaagatgaacactcacaggcgttggtgaggatgtggagaaactggagctctcctgtatggctaggagcaatgtaaatgagcagccgctgagaaacagtctggcagttcctttaaaggtgaaacacaagagttactctgtgacccagcagctccactcctaggagtcgcccaagagaaaaacatgtcctcacaaaaccttgtacacaaatgtctgtagcaacgtcgtttattatggccccgaggtggaaaccaccttcatggctgtccagtgatgaatgggtaaacaaaatgtggtccatccgttgcatggactattagccagccatgaaaagcaatggcatgctgctccacgctgtagcagggatagacctgggaaacatcgtgaaactcagtggaagaagccagacacagaagcccaagtattgtatcatccctatgaaatgtccagaactgcagattcctagagacacagcagatgacagattgcccgggcagagggtggggaatggggagcagggcgtgactgctgatggggatggggcttctttatggggtgagagaatgttctggaaatggtggtggctgcacaactctgtgaatacactaaaaatcactg

SEQ ID NO: 1732 - protein, 301 aa, Homo sapiens
METPEVPVGSLIDFGPEAPTSSPLEAPPPVLQDGDGSLGDGASESETTESADSENDMGESPSHPSWDQDRRSSSNESFSSNQSTESTQDEETLALRDFMRGYVEKIFSGGEDLDQEEKAKFGEYCSSENGKGREWFARYVSAQRCNSKCVSEATFYRLVQSFAVVLFECHQMDDFGPAKNLMTMCFTYYHIGKPQLLPPESREKPAGSIDSYLKSANSWLAEKKDIAERLLKNTSARTENVKGFFGGLETKLKGPLARRNEEDENKPQEKRPRAVTAYSPEDEKKGEKIYLYTHLKQQPIW

SEQ ID NO: 1733 - DNA, 7762 bp, Homo sapiens
caagagtgcctgaggctggatcagaaatagccacgatcgtccagtttgattgattgattgattgatttagttgtgatggagtctcgctgtatttcccaggctggagtgcagaggcacgatctccgttcactgcagcctccacctccccggttcaagtgattctcctgcctcagccttccgagtagctgggattacaggcacctgccaccacgcccggctgatttttgtgtttttagtagagacagggtttcgccatgttggccaggctggtcttgaactcctgacctcaggtgagccacccgcctcggcctcccaaagtgttgggattacaggcgtgagccactgcccccagccccagcttgatcttgaacctcctgtgtgtgggcagagagacatggccctgctactgcttgaacggcttccggagacagtgacttgtttcctttttccctctgaactatgccgtagggccaggtgagctgctgtgaaggactcattcttggtagccggcagttactggcaacttgtgagcttggtgggctcctactaacgcacctgggacaccaggctgctgggctcccctctaggcagcctcccctccaggcagcctcaccagcagctcccctgagccatggagaccccagaggtccccgtgggctcgctaatcgactttgggcctgaggcacccacctcttctcccctggaggcaccaccccctgtgctgcaggacggcgatggctccctgggggacggtgcatcagagagtgagaccactgagtctgcggacagtgagaatgacatgggcgagtcgccctcgcacccgtcctgggaccaagaccgccgttcctcctccaacgagtccttctcctccaaccagagcaccgagtctacccaggatgaagagaccctggcactcagggacttcatgcgtggctacgtggagaagatcttctctggaggggaggacttggatcaggaggagaaagccaagtttggagagtactgcagcagtgaaaatggaaaaggccgggagtggtttgctcgatacgtgagtgcccagcgctgcaactccaagtgtgtctcagaggcaaccttctaccgcctggtgcagtcttttgcagtggtgctgttcgagtgtcatcagatggatgactttgggcctgccaagaacctcatgaccatgtgcttcacctactaccacatcggaaaaccacagctgctgcccccggagtcccgggagaagcccgcgggcagcatcgactcctacctgaaatccgcaaacagctggctggccgaaaagaaggacatcgccgagcggctgctgaagaacacctcggccaggactgagaatgtcaagggcttcttcggggggctggagaccaagctgaaggggcccctggccaggaggaacgaggaagacgagaacaaaccccaggagaagcggcccagggctgtgaccgcgtacagccccgaggacgaaaagaagggggagaagatctacctgtacacgcacctgaagcaacagcccatctggcacactctgaggttctggaatgcagccttttttgacgctgtccattgtgagaggacaaagcgatctcccactaccagaggggatgctggagaggaggaggagaagagggagaagtggtgccacatgacccaggaggagcgcgacgacagcctccggttcaacgagaacatcaccttcgggcagctgggcacattcacgcacaacatgctggcctttggactgaacaagaagctgtgcaatgacttcctgaagaagcaggctgtgattggcaacctggatgaagagcaatacaagctgcttagtgaccacattgagcaaatggccactgagtaggccccagaggtcgcactccgcaggaggactgaggccatgtgccattctcccgggcccagcgcccggccgtcaccccacccgatgacctgcatgaagccagcagcacccagagccactcctgctgccctagaactagcggttagaagaatccgctgttcctccctcatctcctctgcctgtgtctgcgacccccatccatgtgccaaagtgtcccttgggtcacacagctaaagccgaggtgaccagttgtaccccgagtgccaggcttgtgagatgagaccaagagggaggaggggaaggactccatgggccatcgtgggccaagggctggcgagggtgggggcgggcaagggatgcaggcaggacagccatgaggtggggctgcagccggcacacccagtggtggagggccggcgctgccactcacggtgggtggccgtgggccaccttccctgcaatgggtgcacacgcggctcccatccagccctctcagcgtggggctgtggctggtcctcactattccccagtctcccgctgtggggcaggaacaggaagtgacgggaaccttgaggaggaaacgcctgtgttagggagagagtgggtgcggtgtagaggatgctcttggccggctggagcaagacctggctcccaccagagggacgtgtgtgtgcctgcagacggcccgggagctgtgtgtctccgccagagtcacagcagtgccgaggtgtccgcggcagaccacacagaccgtctgaaatgcgcccgcctggcggacagctcccttctgaagcagagaagcctccatggtcacgaagcagcgttgtgctgtgtgtccctcgcaagaagcacaggaaagagaagtttctttagtagccactagacaaccaccctttctgaaagcaaacagtgctgctctttattccagacaaggcaggaaagtctgagttgggagtgacagtggctggagagaagcagatctgtgcaacgtgcagggcaagccagtggcgtggcctctgcctctaagcgctgagcattgggccccttccccaccagacctttgtagctcctccagcctctgcagagactcccttcacctcgcacttactgcctgggaaccacggcccttctcttctgtgggtctgtaccaggtactccaggccagcccatgggcccggggcctgaccccaacacctgcatgctgggtccagagccttctgtttcaccgtgcgtggacactgctaggccgcctggggtcccctgcctcctgcctgtcgctgccgtggtccctgactgcgaaataggcccgcggggctctccctcctcctgccatcctcccctcccgcccttcctggctacctcctctgacatgcggtcagataagtcccgtcttgtttgtgagtaccacagaaacgcctgagagtcacttacccggccactgcttggaaggtttccctccggggaatgcctccctggaatgttccagagacggaacattctctagagacaacagtctgtgctgcagattggttggatcacagaatgtgtgtctggggcattatctgaaacgtggtgtcatctgatgcatttggaccatatgctgccagactgcagaacgggggagccggggctcagggcccctgactgcatggtgcatgagtgatctcagcctagcgatgccgctggccagaccgtgaccatgctgccagtgtgctcgccatgagctgggtcagggctggggagttgtgcaggctggggtgacccttcccccatcattgggccccaacgggcatgtctccaccgaatccatttagagaaatgtcagagcgagggttgtgtggacacccctcgctctgatgccaactgcagataatacacacctcctgcagcgtccagccacggctccagggcactgctctcctccttgcaccggtgaaactcaggccacactcaagggctgactgtccaggcgctcccttcagccgcctcgtcgtcagcgttcttagtcatgcattattcgtgttagctgaaatgcattcagactttgttctgcggtgcccacaggacttacccctgtatgtacaggatttttgtatgaaagttttgtttgattctgagactctcttgggaacgctggagagcttgtgcacagcctctggaaggaaaggcagcgctgacttcgttgggcttttttccaagcactttaacttcagaaatggtcttgacacttttttctccacatagactcttgaaatagccatttcaggggaggaaagggttggggttttctttgtttgtttgtttgtttccccctttactacctgttcttgtagatctagctcctcagagttggaggaaggctgacagagaaggtctcctctgtgctccatccacacaggatgccggagagacagccccttgtgctgtgagcagagcaggcagtggctctggaggctgcctgtggtctccttccggctgtggctgacagtggctctggccagggttgcttggagaaggctcagtgtgcctgggacagggcttaccacctgccaccaaggtttcctctcttcccccaggacctgggcagagcaggcatgagctgggctgtggtgcagagcaagcagacccagccacactgctcaaaggtccctgcgtggggaggtgtcacaccaggggcacacccagggccacctgggtgtaggagagctctggtggcccctccgtaaactcaggaagtgtcaggtgatttcctagggagaggttcccagtcccagcaggcagaatgcccaaaaccaggagcacgaaggcctgtcatccatggggccattgcaggcactctgccgcccgaccttgagggctgtgccaatcctagtgaaccaaaatgcaaacaactcacacaagtgaaaagctccctgctttgaaaacaggacatgttgacaggcagcatggtatgtttttagcctttgttacagttttagcaacattgatgtctaagaggggccgtggtaatagattgcatctgccctgtgcatgcgcatgtttaaccacaggccagagaactcaattctgatgtcgtaagttctctgtaagtgaaatggggtagactgtatgattttcctattgccaaaagaaagaaagggggccaaacagctctgaaatttccaaaaaatggctagagggagagtccagtttctgagctctgtacccaaattaaaatcctgatgttcaggttaatccaagcaacacgcattgggtttaaaaccagcaccgaggcccagtgggggaatcacagacatcaccaagtctcgtcttctttccttcctgtgagttgaaaccaaacaggcctctcgctcactcctcccagcccagtaatgctgaggagttcagttgtgaggaaagaaggctggagctgtgagattcgcttttccctaggctgttccgcgtgggttaccttatcaccctggagcacttggtattccagacccctgacatgaggaatgcaggttcacactgtaaagagtttgtgaaaggtttcagtctaactggggttccttagctggaagccagggctggaagctacaggcctgaccttcctgggtcccactatctgttggcattttttttttttttttttttttagacggagttttgctcttgttgcccaggctggagtgcagtgacacaatctctactcactgcaacctccacctcccgggttcaagcaattctcctgcctcagcctcctgagtagctgggatgacaggtgcacgccaccacgcccggctaatttttatatttttggtagagatggggtttcaccatgctggccaggctggtctcgaactcctgacctcaggtgatcccccccacctcagcctcccaaagtgctgggattacaggcgtgaggcatcacacctgcctctgttggctttttagttaggaaggatccagctaggcccgtgtggttagatcagctttgttactgaattacctaaaaccagaccacagcacagccagggagcccagtagtgtttccaagaacagtgtggagcttgagaaagagaactttaaaaattagagggtccctttctgcagaggaagggatgctcgcagggtggcagtggcccagccccagcctcagggacggggagggagagccccctctgggcccagcaggcaggtgttctgaggctggtccctcctcagtttccgcagccacaaggcgaaacggccagattctcactcaaggtcgttctcactccttttcctgtcccgtttccagtcccactgagccattcacttctgctgaaccatttttcttaggatgcagccgtctcactcccttgtcctgtaaatcgtgtattcatgttgatgattcttggagataggtttcactttttcccagctgcgtccacaggaaaggggagtcggatgccagctgcaccccgcctggctcgcacaggctaagaccacagacagagcagggcttcccggagccacacaggccacgcaccccaggaacccttgctgccgcgggccaggaacaggaatgtgttggtgcctgagacaccaaatggaagaagcacatcaagactgttctcctgcggccaacactggcccggaagccgccctccatacaggccctcagggggcctgccttctgcgcctcagtcccccgtgcatccctgggcctgggtatcacatgctctccaggaaagggacggaatcaatcctgtgaccgatgggctcgcaaggatgggtgccgccgtgggagccctgcctctggtgctggcaagggattgggtttgtgtgggtgtctctagcctgcagagtgcagtgagtgagagtccttgggagcgcggcgctgcctgtagctgtgcctggggatgcacgtggccacgggatttcagtgggacagcgctcccacaggggctgggggtgggggtggggtttcttagttactgttggaaagggaaaaattcaccatatccaaggggagagacgatgggctgggtttgtttactccaacttcccttctacacccctcctgcaggacagtacgatttggggagaacccagctccccactttatctgcagactctgggacctgacaaaacagtcagagcctgagtgcactgcagcctgaactcccttgagcagcgctataagggactttgcactttaaaaaggggatgcctgtcagtaaatcccctgtgcattgactagaactggggggctgcgcccgctccctccttaatcctagatgatttgctcatgaaatagaggtgggggacgaccgcatgcactctgggaggtgcagccctaaggggtggactccagatctccctgcaagagacagcttggcttggctttggctgttggggaggagtccctgccatcccggtgagcctggggctgttgcttagggtcttctgggtggacacgtggagaaagagaaggcaaacgttggaacactaggaaaagctagaaattcagacaacacacatggatccccttaaaacatgtaaatgtgtcagaacacggttgacctgccgccttcttgaacctggtggcccccgttggaactatcagtggcgtctcccatgcacacgccctctgctttctctttcctagactcgcggtgctcacatccagacattaccttgttggtagcccccaagtggcgtgcagtgacaccagtatcttctctgttgcatttttgcaatcttgtgtcccgctcggtgatgttctacaaactctgttttaaggttgagaaagtttcaagggtgaagatctcaaaacagtgctaaaatcaaaggtgtttgctgtgaagaaaaacatgtgtatatattgcaccttgagttgtcagaaggtagaaactgaaataaactaacttt

SEQ ID NO: 1734 - protein, 411 aa, Homo sapiens
METPEVPVGSLIDFGPEAPTSSPLEAPPPVLQDGDGSLGDGASESETTESADSENDMGESPSHPSWDQDRRSSSNESFSSNQSTESTQDEETLALRDFMRGYVEKIFSGGEDLDQEEKAKFGEYCSSENGKGREWFARYVSAQRCNSKCVSEATFYRLVQSFAVVLFECHQMDDFGPAKNLMTMCFTYYHIGKPQLLPPESREKPAGSIDSYLKSANSWLAEKKDIAERLLKNTSARTENVKGFFGGLETKLKGPLARRNEEDENKPQEKRPRAVTAYSPEDEKKGEKIYLYTHLKQQPIWHTLRFWNAAFFDAVHCERTKRSPTTRGDAGEEEEKREKWCHMTQEERDDSLRFNENITFGQLGTFTHNMLAFGLNKKLCNDFLKKQAVIGNLDEEQYKLLSDHIEQMATE

SEQ ID NO: 1735 - DNA, 3161 bp, Homo sapiens
gtacgcgcccggccgccgcctccaggcagcccggagcaacccggcgcccggccccgctgggcgcagcactccgtcggcggcggcggcggcgcgatgctgtgcttcctgaggggaatggctttcgtccccttcctcttggtgacctggtcgtcagccgccttcattatctcctacgtggtcgccgtgctctccgggcacgtcaaccccttcctcccgtatatcagtgatacgggaacaacacctccagagagtggtatttttggatttatgataaacttctctgcatttcttggtgcagccacgatgtatacaagatacaaaatagtacagaagcaaaatcaaacctgctatttcagcactcctgtttttaacttggtgtctttagtgcttggattggtgggatgtttcggaatgggcattgtcgccaattttcaggagttagctgtgccagtggttcatgacgggggcgctcttttggcctttgtctgtggtgtcgtgtacacgctcctacagtccatcatctcttacaaatcatgtccccagtggaacagtctctcgacatgccacatacggatggtcatctctgccgtttcttgcgcagctgtcatccccatgattgtctgtgcttcactaatttccataaccaagctggagtggaatccaagagaaaaggattatgtatatcacgtagtgagtgcgatctgtgaatggacagtggcctttggttttattttctacttcctaactttcatccaagatttccagagtgtcaccctaaggatatccacagaaatcaatggtgatatttgaagaaagaagaattcagtctcactcagtgaatgtcgcaggccatttctaaaagtgctacagaggacagacagggttttgaggccaccctgattattgggatgcatctgcagcacatccaggacttgaatttcattacgagttcctaatagttgtatttctaaagatgtgtttcctagagaatgtacagccttatgacactgtagtgatgtttttataattttctaagtagatttttttatattaacaaattcatatacagaaaaaataaggtgttacaaaaaatggagagctcttatttttgtacagattctgtcgtttttgttttatttgtgtgagatttatggaaatacactaaatgagtaattcaggttcagtacatttattacaaagtgaaatcaggggatattcatttgtaaattttattcttagtgaatgaactgtataattttttttatcaggagagcacttataaaattcaatttataaagatcatatacccaaatcataaagatttagttgatacattaacactaagatactctgatttttagccgaactaaacaaagtgcttctactgagaggcctttataccaccatgtacagtaactctaagtgaatacggaagaccttggttttgaaattctgccaccttgtttctccctgctcatgaggtcgcaccttttgctcttgctgctaattgcccattcgtagtgggtgtaatgccaggtggaatggtttcaacaagtcaggtgaaaaccatcctttattgttgctggcacaacttgatatatagtctgactcagaactgaagctcacatctcaaattcatttcatgccagtaaatgtggcaaagagaagaaaggcccaagagcgagacaagaagaatggagaagggggcagccaagaagaacttctgggttcagggtactgtttatttgctccttctcttcatgcctgtggctggatgtcccacaacactataagaaatataagtcaagccctttgtgttaagcaagaactacagactccatcttttcacccaaatcatgaatgaccaataaaaagcaagttattccagaggaagaagcagcccttgaaatgttaaggcttaggcttgaaaggtgaagagcaggaattctctctttcaaatcctagagcataaacccatgtgtggccaagtgagatcagccctcaagggcacatgccaagggcagagcagcccatgtagacagcttcggagggcatgggggtgtagggagttcggggtagctcctcattaactatttgttgggtgagtaaaggggtgaggctcagtggcaggtacctctgcaatgacaagctgcctcccctctatgtgtttagcatatgttattagaacatgtccgacacccctaccgctgccatttgggccctttaataaagccaagtagagaaatctggcaataaaaggcaaatgtaagcatgctttctttaagacgcatcataaatggttttctttaagtgaatggaagagtttgacagagatacacctttgtaagaaaacattaagaatgctggctggctgtggtggctcacacctgtattcccagcactttgggaggcctaggcaggaggattgcttgagcctgggacttcgagaccagactgggaaacatggcaaaatcccatctctacaacaaaaatacaaaaattagccaagtgcggtggtgtgcctgtagtcctagttacttgggaggctgaggtgggagaatcacctgagcccaggaggtggaggctgcagtgagccatgccaatgcactccagtctgggcaacagagtgagaccctgtctcaaaaataaataaataaataaatgaataaagagaatgctaatcatttctgggttcactgcgactcactgtagtgctggggatcccccttgtaacactggaactgaaagacagtgatgaaagctatgtcaagcattcattattctgaagaggaggagaaatgccacatacctttcccatgggacctgtggtggaatgaatccatacttctgcctcacttcgagcagacttttgttctcggcgctcctcacgatggagtttcatgcttcattttcacatctctctgcacaattagattgggagctccttgagggcagagtacgtgccttaatctttatctttgtaatgccacaatgaacagagtgcctcctggtacactgtaggagcttaagaaatactcactgaatgcatgaatgaatgaatgaacaaatgaaggaatgactaaggatgtttgtagtgctataatatagaatgggatttactctgctttaccagttagtttcataataaacaaatagtctgt

SEQ ID NO: 1736 - protein, 238 aa, Homo sapiens
MLCFLRGMAFVPFLLVTWSSAAFIISYVVAVLSGHVNPFLPYISDTGTTPPESGIFGFMINFSAFLGAATMYTRYKIVQKQNQTCYFSTPVFNLVSLVLGLVGCFGMGIVANFQELAVPVVHDGGALLAFVCGVVYTLLQSIISYKSCPQWNSLSTCHIRMVISAVSCAAVIPMIVCASLISITKLEWNPREKDYVYHVVSAICEWTVAFGFIFYFLTFIQDFQSVTLRISTEINGDI

SEQ ID NO: 1737 - DNA, 2198 bp, Homo sapiens
acaattgtcgcgggtagtggggcgccccagctgccaactgcacgtggtttctttctggcgtttgcctagtgtcctgtccattccgccccgttgggaagtgggaagcggagaggttctgtggggacagagctgggagtcctgaaggagaaagcgcgcagccgaggggctctggagtgccttagagcagagctgcggccgcggaaggggagcagctgagaaaggagggccgctgcaggcggggttcgaaccgtggggtctgggctgctcccgcggagggcctgggcggacgcgggatgctgggggtccgctgcctgctgcggtccgtgcgcttctgttcctccgcccccttccccaagcacaaaccttcagccaaactgagcgtgcgggacgctctcggggctcagaacgcgagtggggagcgcattaagatccagggatggattcgttctgtccgatcccagaaggaagtcttgttcctgcatgtaaatgatgggtcatctttggaaagccttcaggttgttgcagattcaggccttgacagtagagaattaaattttgggagttctgtggaagtacaagggcagctgataaaaagtccatccaaaaggcaaaatgtggaactgaaggcagaaaaaattaaagttattggaaattgtgatgccaaggatttccccatcaaatataaagagaggcatcctctggagtatctgcgacaatatcctcactttaggtgtaggactaacgttctgggttctatattgaggattcgcagtgaagcgacagctgctattcattctttctttaaggacagtggctttgtacatattcatactccaataatcacatccaatgactctgagggagctggagaactttttcaacttgaaccttcaggcaaacttaaggtacctgaggagaatttcttcaatgttcctgctttcttaactgtctcaggacaacttcatctagaagtgatgtcaggagcttttactcaagtgtttacctttggtccgaccttccgagctgaaaattctcagagccggaggcacctggcagagttttatatgatagaagcagagatttcttttgttgacagccttcaagatcttatgcaggttatagaggaactgttcaaggctacaacaatgatggttctctcaaaatgtcctgaagatgttgaactctgtcacaaattcatagcacctggccaaaaggacagattagaacatatgctaaaaaacaactttttaatcatttcttatactgaagcagtggagatcttaaagcaagcatcccagaacttcacctttaccccagagtggggtgctgacctacggactgaacatgaaaagtacctggtgaagcactgtggcaacatacctgtcttcgttattaattatccattaacactcaagcctttctacatgagggataatgaagatggccctcagcacacggttgctgctgttgatcttctggttcctggagttggggaactctttggaggaggcctcagagaagaacgataccatttcttagaggagcgcttagccagatcgggacttacagaagtctaccaatggtatctggaccttcgtcgatttggatctgtgccacatggaggttttgggatgggatttgaacgctacctgcagtgcatcttgggtgttgacaatatcaaagatgttatccctttcccaaggtttcctcattcatgccttttatagctggaagattggttaaggaaaagcaccccccatggcagagacactgcacatgattgtgcatacagcagaatgcatgtttggattttagaaatgcagatttcaatatgtaattgttgtgccataagatatcatagaaaaaatataagtggttgtgattttcttagaaagttgagggtatttcacgtaaggatgagctcccgcaagaagaggtacttatagcaaggggactctcaaatccattacctcaattaagaaatgaagaaattgaattagtctcaaagtttcttttaaactctaaaacagaatgagataatgtattttacgttgtctataatcattaaatcactccctgtgtaatttgtgagaaccatctagtagctcgaaataaaataatgttgcatcttttctcccttgccatatactttgtgataaatccttatctcattttcagtacttcattaaacattgcag

SEQ ID NO: 1738 - protein, 477 aa, Homo sapiens
MLGVRCLLRSVRFCSSAPFPKHKPSAKLSVRDALGAQNASGERIKIQGWIRSVRSQKEVLFLHVNDGSSLESLQVVADSGLDSRELNFGSSVEVQGQLIKSPSKRQNVELKAEKIKVIGNCDAKDFPIKYKERHPLEYLRQYPHFRCRTNVLGSILRIRSEATAAIHSFFKDSGFVHIHTPIITSNDSEGAGELFQLEPSGKLKVPEENFFNVPAFLTVSGQLHLEVMSGAFTQVFTFGPTFRAENSQSRRHLAEFYMIEAEISFVDSLQDLMQVIEELFKATTMMVLSKCPEDVELCHKFIAPGQKDRLEHMLKNNFLIISYTEAVEILKQASQNFTFTPEWGADLRTEHEKYLVKHCGNIPVFVINYPLTLKPFYMRDNEDGPQHTVAAVDLLVPGVGELFGGGLREERYHFLEERLARSGLTEVYQWYLDLRRFGSVPHGGFGMGFERYLQCILGVDNIKDVIPFPRFPHSCLL

SEQ ID NO: 1739 - DNA, 2775 bp, Homo sapiens
tgtttttatgaggctgggaaaatagaacgaggaagtggtgacgcactgggctctcacgaatacaactagaagctgcaacgactgtgtggctctatcgattcgggagaggtccagaccggaaatggtcgtttccatggtaaccctgagcaggttgcctgggagatgacctctttcgggtctctttgaatctccgctgtagcgtcacctggaaggcagatctaacagagaacctggactgtctcctatcatgattcccgggaaatatcgctctgtttctggccgggctgcgaacaacgtgaactgcgggcttcatctggttattcaaacatcatcgcttcctgaaaaaaacaaagttgaattcaagctaaataaagacacatcgtcattccccggtagacttttacaacatgaccttgaaagaaactactcaagtaggcaaggtgatcatattaatttggtgagctcatcattgtcatcatttcctattcttcaacgttcttctgaagagaaaattctttactcagacaggttgagcctagaaagacaaaagctgaccgtatgtcctatcatcaatggggaagaccaccttcgtttgttgaactttcaacacaattttataactcggatacaaaatatttctaatctacagaagttaatatcgttggatttatatgataaccagattgaagaaattagtgggctttcgactctgagatgtcttcgtgtccttctgttggggaaaaacagaatcaagaaaatctcaaatctggagaatctaaaaagcttagatgtcttggatcttcatggaaatcagattaccaaaattgaaaatattaatcatttgtgtgagttgagagttttaaatcttgccaggaactttttaagtcatgttgataatcttaatgggctggattcactaactgaacttaacttgcgacacaatcaaatcactttcgtgagagatgtggataatttgccctgcctccaacatctctttctcagctttaacaatatatctagttttgacagtgtttcctgccttgctgactcttcttccctctcggacatcacctttgatggcaatcccatagctcaagagtcatggtacaaacacactgtccttcagaatatgatgcagctgcgccagctagatatgaagagaatcacggaagaagaaaggcgtatggcatctgttttagccaaaaaagaggaagagaagaagcgggaaagtcataaacaatctttgcttaaggagaagaaaaggttaacaattaacaacgtagctcgacagtgggacttgcaacaacaacgagtagccaatattgctacaaatgaagatagaaaagattctgactctcctcaggacccctgtcagattgatggaagcaccctctctgcattcccagaggaaacagggcctctagactcaggactcaacaatgctttacaaggtttatctgtcatagacacataccttgttgaagtggacggggatacactttccctatatggctcaggagcactggaatctctggataggaattggagtgttcaaacagcaggaatgatcacaacagtctccttcactttcatagaatttgatgaaatcgtccaagtgcttcctaaactgaagattaagtttcctaattctctgcaccttaaattcaaggaaacaaatcttgtaatgctgcagcaatttaacgcactagcccaactccgtcgtattgaccagttgacaattgatcctcaaggaaatccagttgtcaattttacactctggaaatactatgtactgtttaggctaagccatttcagtatgcagaaaataaatggaacagaggtgacacagaatgatatgataatggctgaaaggctctttggaatcctagcacatgtagcatcttctgagttaccccagtatcgtctgatttccattctgggtgatgccaggaaaaagcaatttcggtatctactagaatccaaaggaaaaaaacctggtattatcaacgaagaaaataatgacagcaaaagacttgtaggagaaaacacaaatcgtgctacattaaattatactacaagagacttttataatgaaaagctagaggaaataaaggaaaagaagaaattctgtaaaacatatatagaagaccttgtgaaggaagccacagaaatcaacatgaaaaatgaggctttgcagaagctttggccacagatgttcattgagcttgttagggatgcagtcatagaaattcgcaataaaaattcctatatgaagctctgcctacagcagataacagaccaaaaataaaaatggcctttagttacagttgattttggcagttttattttttgaaggttgaaaatatgcaggttatacatgttaaaacaacaacaacactatcctataaactagaaagactagtataaaagcattattgcccactgttctcatagctaaaagttaagaaggaaggaaggaaagcaggagaaaggaaggattaattgcctgtatgtgaggaccaaacaacctttgggaactaaacagttttcagagatggcgtggcactgcatccttggttcttgctttgattggtgccctgctatagcccaaagcacgtagtatttgctgatgattcagcatgagctgcatctacctacttttagctgataattttcagttatttccctttttattttatgtcatgatttcaaagccaaaaatatgttctttttatgagtgaagaataaacttactaacaaattagtcaaaataaa

SEQ ID NO: 1740 - protein, 686 aa, Homo sapiens
MIPGKYRSVSGRAANNVNCGLHLVIQTSSLPEKNKVEFKLNKDTSSFPGRLLQHDLERNYSSRQGDHINLVSSSLSSFPILQRSSEEKILYSDRLSLERQKLTVCPIINGEDHLRLLNFQHNFITRIQNISNLQKLISLDLYDNQIEEISGLSTLRCLRVLLLGKNRIKKISNLENLKSLDVLDLHGNQITKIENINHLCELRVLNLARNFLSHVDNLNGLDSLTELNLRHNQITFVRDVDNLPCLQHLFLSFNNISSFDSVSCLADSSSLSDITFDGNPIAQESWYKHTVLQNMMQLRQLDMKRITEEERRMASVLAKKEEEKKRESHKQSLLKEKKRLTINNVARQWDLQQQRVANIATNEDRKDSDSPQDPCQIDGSTLSAFPEETGPLDSGLNNALQGLSVIDTYLVEVDGDTLSLYGSGALESLDRNWSVQTAGMITTVSFTFIEFDEIVQVLPKLKIKFPNSLHLKFKETNLVMLQQFNALAQLRRIDQLTIDPQGNPVVNFTLWKYYVLFRLSHFSMQKINGTEVTQNDMIMAERLFGILAHVASSELPQYRLISILGDARKKQFRYLLESKGKKPGIINEENNDSKRLVGENTNRATLNYTTRDFYNEKLEEIKEKKKFCKTYIEDLVKEATEINMKNEALQKLWPQMFIELVRDAVIEIRNKNSYMKLCLQQITDQK

SEQ ID NO: 1741 - DNA, 1054 bp, Homo sapiens
attcaagcctgggccctggaaggaggggtggacagtcccctcccttccagtccagcatgggtctggggaagagaagcagctttgcctggaaggggcctcctaggagggggagcggtggtttctagctcaggctttaggatcagagagcagcagattcaaatcctgacggttttggtaaagtcaattcaatctctccaagactccgtttatttgatctgcgaagtggggataatggtatcacgtcgcagggttgtcaggcggagctggtaggggagctgccccccagagcagcatggatgccccgcgaagggacatggagttgctcagcaacagcctggctgcctacgcgcacatccgcgccaaccccgagagcttcggcctctacttcgtgctgggcgtctgcttcggcctgctgctcaccctctgcctgctcgtcatcagcatctcgtgggcgccccgcccgcggccccggggcccggctcagcgccgggacccccgcagcagcaccctggagcccgaggacgacgacgaggacgaggaggacacggtgactcggctgggccccgacgacacgctgccgggccccgagctgtccgcagagccggacgggcccctcaacgtcaacgtcttcacgtcggcggaggagctggagcgggcgcagcggctggaggagcgcgaacggatcctgcgggagatctggcgcaccgggcagccggacctgctgggcacaggcacgctggggcccagccccacggccacgggcaccctgggccgcatgcactattactgatgggccccggctcccgctgcaaggcgctcggggtaccggacctgcacatgagctcagagctaccccacaccttcggactgcctcggcccccacagctcccaggtgctactgggcgtggaccgccaccccctgagaggctcccttccccagtcctgccagaagaccccgggggcggggagggggcagcatgcagggtccccactccctctctggggtcgatgaagaggtgaagtgaccaaatgaaagaaagctgcattctcagtg

SEQ ID NO: 1742 - protein, 165 aa, Homo sapiens
MDAPRRDMELLSNSLAAYAHIRANPESFGLYFVLGVCFGLLLTLCLLVISISWAPRPRPRGPAQRRDPRSSTLEPEDDDEDEEDTVTRLGPDDTLPGPELSAEPDGPLNVNVFTSAEELERAQRLEERERILREIWRTGQPDLLGTGTLGPSPTATGTLGRMHYY

SEQ ID NO: 1743 - DNA, 4597 bp, Homo sapiens
actttgccagagcggccgggtccccattcccattccttcaaatcccctttttcccggcagccgacctgtagacccaagggagacaggttgaagctagaaagagtcggggcagcagctctggtaggggagggagcatccaaaacctctggcttctgagcgcctctcctgccgcccatccacaaagccccccacagcctggcggctgccctcgaccccgcaaaacaaaggacttcagaggctggacctacagacccagatgagaaggcaaaagcgtagggaggagcggcaggagatgggaagggcgggccccgctcggagcagctgccgcttcctcccaaagtcccacgaggggcctgagtcacgggccaccgccctgggtcggcgagctgggggaagggatctggacacctggcgtgtccgggcgggaagctggtgagggcccctggggacagagcggaggaccagtggttggggcgagaagagggcagtcccgcagcgagtcccacgcggggtgggagggatctaggccccgccctctcctcggctccgccctgcgcccccttccctctcctcattgtccttagacaaagcggtcgccgcccccgcccggccccctggtctctgtctccgtccctcctcctttgctgcctctttccctcctcctctccctccctcctcccctccctccagtctccggatctccctcggtccctctctcctcctcttcctctctctggacgcccggctcctccgcaccccctcccccgggggtcccgcggcctgtgagttgactgaggggctcagacttggggagtgggtgtctcctcgcccctgtccttgctcccgtccctggcccggaccttggctgtctcctctttgtgccgagattgtcagtctgtgcggctacagcggggtggagacggccggctctgtcacggcttcatgagagcggggacggggcgcaggacttgcaggcgccggggagaagagacatggagccggcccttggcactctggggtcgcgtggggcagtcggtgggggaggcaggcggtggtgacaggacagggtgggggtggacgccagggttctgggaacgcgctggcagccctgacgcccgggttccgaaagtctcgggggtggctatttcccccgacccgcctcgggggcggagtgcggggcagaggggtgggggctggggagaggcgtggcccgagcggtgctggaagcggagccgggacctttggggcccgcgctgagacgcgcccggctgctgccgccgccctcctttcccctcttccctggtttcccttctcctctagacctgttcgctctccgcccctccttgcctccccaacaccccctcaggtcccgttgcctcctggtcctttcagggattcctggtccttccttcccacactagcctccctggggtatcgctgaggcagcctggcctgcacccaggttcccctcacccctgccacatttctctcttctccctcacgccaactttccttttcgcccttctctctctttctcacatcctagagacggtctttaatacgcattaaccctgtgctgccacatctggctcctgccctcattgcctccaatccggactcttcctctcacatcacccccaccacccccaacttgggctcacaacttctcttcactttttccatttccccagttctctgccttccgtctttccctctgtcctcatccttagcccctctgccctgctttgtgtcccacctctccccctccacttcctctcctcccaccctcagtctcacccccgggctgtctcactctctggagcctctccttcctgttctctgtccccagtgctccctaccctcacctcaagacgaccatggccaccatcccagactggaagctacagctgctagcccggcgccggcaggaggaggcgtccgttcgaggccgagagaaagcagaacgggagcgcctgtcccagatgccagcctggaaacgagggctcctggagcgccgccgggccaagcttgggctgtcccctggggagcctagccctgtgctagggactgtagaggctggacctccagacccggatgagtctgcggtccttctggaggccatcgggccagtgcaccagaaccgattcatccggcaggagcggcagcagcagcagcagcaacaacaacggagtgaagagctgctagcagagagaaagcctgggcctctggaggcccgggagcggagacccagccctggggagatgcgggatcagagccccaagggaagagagtcaagagaagagagactaagtccgagggagaccagagagaggaggctggggatagggggagcccaagagttgagcctgaggcctctggaggctcgggactggaggcaaagcccaggagaggtgggagacaggagctcccgactgtcagaggcatggaaatggaggctgagtcctggagaaactccagagcggagtctgagactagcagagtctcgagagcaaagccccaggagaaaagaggtggaaagtagactgagcccaggggaatctgcctaccagaagttgggcctgacagaggcccataaatggagacctgactccagagagtctcaggaacagagtttggtacaactggaggcaacagagtggaggctgaggtcaggagaagaaagacaagactactcggaagaatgtgggagaaaagaagagtggccagttccaggggtagctccaaaagagactgcagagctgtccgagaccctgacaagggaggcccaaggcaacagttccgcaggagtggaggcagcagagcagaggcctgtggaagatggcgagaggggcatgaagccaacagaagggtggaaatggaccctgaactccgggaaggctcgagaatggacacccagggacatagaggctcaaactcagaaaccagaacctccagagtcagcagagaagcttctggaatctcccggtgtggaggctggagaaggggaggctgagaaggaggaggcgggggctcagggcaggcctctgagagccctgcagaactgctgctctgtgccctcccccctcccaccagaggacgctgggactggaggcctgagacagcaggaagaggaagcagtggagctccagcccccaccaccagcccctctgtctcccccacccccagccccaactgccccccaacctcctggggatcccctcatgagccgcctgttctatggggtgaaggcagggccaggggtgggggccccccgccgcagtggacacaccttcaccgtcaacccccggcggtctgtgccccctgcgaccccagccaccccaacctctccagccacagttgatgctgcagtcccgggggctgggaagaagcggtacccaactgccgaggagatcttggttctggggggctacctccgtctcagccgcagctgccttgccaaggggtcccccgaaagacaccacaaacagcttaagatctccttcagcgagacagccctggagaccacgtaccaatacccctccgagagttcggtactggaggagctgggcccggagcctgaggtccccagtgcccccaaccctccagcagcccaacccgacgacgaagaggatgaggaagagctgctgctgctgcagccagagctccagggcgggctgcgcaccaaggccctgattgtggatgagtcctgccggcggtgaccatcttccaacatagggatatacctccctccttcttataactgaagatcctggagcccggaagattcagggcagacagaccctgataatgagcctggcagggaagggcaaccaacatcttgtaacttgctttccccaccctgtttctgggggcagagccaattgcccaatttctaccctaatccaaagtccctggtgtgggtggggttaaacgtgctggtgcatcctaggtcatccaagagtgagcgccaagtcctgagaaggggcacagaactccctggagggtggagatggagcacctgccccccatggcagggtacactctccccacagccttcctccccaccatcccgtggggactctcgggatttaagcactcgtctctctgggaggcccagaccccactccatttataggcacatctccttcatttcctaggtcactgcccctttgtttacagctcctgcctcctcccttgaccacagcctggtttacaaattccatcagctcccagccccacctgccaaagtcccaggtttacaagccacgcttacttgctgtgtctgcgtggaattctctcctctgtcccctccagtctcctcattggagtgacctgaaggtgtggcttcctccactttttctcagtattactttgccttagttttccccaagagggaaggctggaactcttaactctgtaccccttgatagttatttaattctgtttctcctagtggttcacaattgaactgaattgagatggtgtcgggtggctaaggagacacctcacctctccttccccattgtgccgcctttatcaattgcctgttttgttttgtttgttttttaactttccataataaaatggagttctcttc

SEQ ID NO: 1744 - protein, 662 aa, Homo sapiens
PLCPALCPTSPPPLPLLPPSVSPPGCLTLWSLSFLFSVPSAPYPHLKTTMATIPDWKLQLLARRRQEEASVRGREKAERERLSQMPAWKRGLLERRRAKLGLSPGEPSPVLGTVEAGPPDPDESAVLLEAIGPVHQNRFIRQERQQQQQQQQRSEELLAERKPGPLEARERRPSPGEMRDQSPKGRESREERLSPRETRERRLGIGGAQELSLRPLEARDWRQSPGEVGDRSSRLSEAWKWRLSPGETPERSLRLAESREQSPRRKEVESRLSPGESAYQKLGLTEAHKWRPDSRESQEQSLVQLEATEWRLRSGEERQDYSEECGRKEEWPVPGVAPKETAELSETLTREAQGNSSAGVEAAEQRPVEDGERGMKPTEGWKWTLNSGKAREWTPRDIEAQTQKPEPPESAEKLLESPGVEAGEGEAEKEEAGAQGRPLRALQNCCSVPSPLPPEDAGTGGLRQQEEEAVELQPPPPAPLSPPPPAPTAPQPPGDPLMSRLFYGVKAGPGVGAPRRSGHTFTVNPRRSVPPATPATPTSPATVDAAVPGAGKKRYPTAEEILVLGGYLRLSRSCLAKGSPERHHKQLKISFSETALETTYQYPSESSVLEELGPEPEVPSAPNPPAAQPDDEEDEEELLLLQPELQGGLRTKALIVDESCRR

SEQ ID NO: 1745 - DNA, 6320 bp, Homo sapiens
cttaagggcgggagtctcggtttgtggtggcttcgctgaggcagtggtggccgcactataccgttagaaactcaatttcccggaggttgtgaggccctttgaggcgaaatcgctctgggcgtgaaaggagcaggcgttggcaatggaaggaccaccgcgacctcaggctgaccgtagggagggatcttgagggccctccgagtcccctgggcttgcgctttctttctttgcagccaccgtgcctaccgcgaggatgagctcggcctcggtcaccgctttcgagaaggagcatctctggatgtatctgcaggcgctcggcttcgagccaggcccggcaaccattgcctgcggaaagatcgtgtcgcacacgcacctcggagtgaacatgtttgacaagctgaaccgtgatgcctttcatataatttcttattttttgtttcaagttctggaccagtctctcaccaaagaagttttcaaattttgttggcccccatttgaccaaaaaagtgacactgaattccgaaaacattgctgtgaatggataaaaaggatttctggtgaatgtggaagtagctttcctcaagttgttggttcactatttctttctcctggtggtcctaagtttattcatctgatgtatcattttgcaagatttgttgcaatgaaatatattaaatccaattctaaaaattcttctcatcattttgtagagacatttaacataaaaccacaggacttgcacaaatgcattgccagatgccatttcgcacgtagcagatttttacaaattttgcaaagacaagattgtgttacccaaaaatatcaggaaaatgcacaattatcagttaagcaggtacgaaacttgagatctgaatgtataggattggaaaaccaaataaagaaaatggaaccctatgatgaccacagtaatatggaagaaaaaattcaaaaggttcggtctttgtgggcttcagtgaatgaaacgctcatgtttttggaaaaagagagagaagttgttagttcggtccttagtcttgttaaccaatatgctttagatggaactaatgttgctattaatattccaaggctcttacttgacaaaattgagaaacaaatgtttcagttgcacataggaaatgtttatgaggctggaaaactgaacctcttaacagttattcagttattaaatgaagtcttgaaggtgatgaaatatgaacgttgtcaggctgatcaagcaagattgacggtagaccttcactaccttgaaaaagagaccaaatttcagaaggaaagattatcagatctgaaacatatgaggtatagaataaaagatgatctcacaactataagacattctgttgttgaaaagcaaggagaatggcataaaaagtggaaagaatttcttggtttgtctcctttcagtctaattaaaggttggactccatctgtagatcttttaccaccaatgtctcccctttcgtttgatcctgcctcagaagaagtgtatgcaaagagtattctttgtcagtatcctgcttcacttccagatgcacataagcaacataaccaagaaaatggttgcagaggagacagtgataccttgggagcgctacatgatctagccaacagccctgcctctttcttgtcgcagtcagtttcatcatcagatagaaacagtgttacagtacttgaaaaggacacaaagatgggaactcccaaagaaaaaaatgaagcaatttctaagaaaataccagaatttgaagtggaaaattctccattatcagatgttgcaaagaatacagagagtagtgcatttggagggtctttgccagctaaaaaaagtgatccatttcaaaaagagcaagatcatctggtagaagaggttgccagagcagttttatctgattcaccacagctctctgaaggaaaagaaataaaattagaggaactaattgactctctgggttctaaccccttcttaacaaggaatcagattccccgtactccagaaaacttgataactgaaattaggagctcatggagaaaagctattgaaatggaagaaaacagaactaaagaaccaattcaaatggatgctgaacatagagaagtattgccagaatcattacctgtgttgcacaatcaaagagaatttagcatggctgattttctcttagaaaccactgtatcagattttggccagtctcatttgactgaagagaaagttatttcagattgcgagtgtgtgcctcagaaacatgtgctgaccagtcacatagatgaaccaccaacacaaaatcagtcagatttgttaaataagaaagtaatttgcaagcaagatttggaatgtttagccttcaccaagctttcagaaactagccgaatggagacattctcccctgctgtcggcaataggatagatgtgatgggtggcagtgaagaggagtttatgaaaatattggaccacttagaagtttcttgtaacaaaccttccacaaataaaactatgttgtggaattcttttcagatatcaagtggaattagttctaagagttttaaagataatgattttggcatattacacgaaactctcccggaagaagttggtcatctaagttttaatagttccagtagttcagaggccaattttaaactggagccaaatagtcctatgcatggtggcactcttctagaagatgttgtgggagggagacagactactccagaatcagactttaatttacaggctcttcgcagtagatacgaggctctgaagaaatctctttccaagaaaagggaagaatcttacctctcgaattcccaaacacccgaaagacacaaaccagaattgagccctactccccaaaatgtacaaacagatgatacgcttaactttttggacacctgtgatttgcatactgagcatataaagccatctttacgcacgtccatcggtgaaagaaaacggtctctttcaccactaattaagttttctccagtggaacaaagattgagaaccacaatagcatgtagtcttggagaactacctaatttaaaggaagaagacattttgaataagagccttgatgcaaaagaaccaccgtctgacttgacaagatgaagacgtacccatttaatataactatgatgcacttaaattgaagctatgccacaggatagaaaatgaattacaacttaaatacatgttggaagtgtaacactgtttttcaaggtttaaaaaaattcctaatgccttttagccttctttaatatttttaggtaaggaaagtatgtttggattttttcctctttgtaggtatatgagattgaaatgtgaagtatttggacaacaaacgtcaagcaatgggaagccattttgatttcttgagtaatcttgtaagcattaagtgaatgacaaagtagtagtgtaacttatttcttatgttataacttcagtcaattaatataaggatagtttttgttgtatgttcactaaatggttaatataatagccattgaatatactaatctttcatcttagagaactatacaacttttattgtttcttaatggaacattctggctaaccagaaaaagtgagaaaagtagtaccttgggatgtgtagtcaagatgacaaattttaagactggaaaagctctaaacaggcttaatgattcttcaggtagaatgatcctgagaagtgatgtttgatggaataaagtgcatgtgatgattaagtgaagactggggcagaatgatttaaaaaaaggaaaaagatggaagatgagtagacacttgcaaggaacactgtcaaactataaatccattcagtgggttgtataacatttatatttagtctaatttagactttgataatttaatgctacttttatattttaacaaaaatataaattaaaattttcattagtctgttttgttgttgggtttttttgtgaggtactccctgttgggggaaaggaacaaggaacaaccatcagaatcccccagtccctacagaatagcctcacagtaacttgagaaaactgaacttggggttaaataacttgtcacacttgcagtctcctgcctcactccttcaggtgccctgcctagaaaaagacttgtgtctagcatccaagtgaacacatactattgccctctgtgaaccaggaggaatggaacaggcaatggaagggtgatagtacctacaataccctttgtagaccccatctcactaccatcaaaatcttgtccactagcccccaaaaaactggcaaggaaagaaggtggaggggaaatttatggaagtagatggcttaatagttatttcttttatcttgggctgcctttctctaagttggttgtcctgtcccagtgtgaagacccatctttttgtgagaaaagacaaaagaaagcacatgtaactaccttctttgcaatggaaaaggagaaagaaaaaatcttctcctaagttgctgttttcttttattagttaataaaacaaatcagggactatgcaggtctatggggaaacctttagtctgctttaagaaaactcagtatctgaaaatcttaacttagcatgtgatactgtcttatcagcatctgcagaagtgccaaagccactgctagacacttaatgtgtattatttcatttaattatattttaaatgtgcttccttggtaattcttaagctcgagaaagagtttgagaactgctgctaggaaatagagattcacatttaaccctgtggtacttttaagaagcaggtacgttgttgcatatatacttgggtagagattggtaactatctgatagggaagctcaagttggccacccaagtctgagaaacccttaattactgagaatcaaaagagcagaatgtctgtagacattttggatttgtaaaaatcacattgttgagttatacctgtgatgggctgaaagtttttggcattctttcctgttcttcatatgccagtaccataaacaaaaagtatctcagatctgtcactttcttctcctaaaccaatgtgatggcagctttttgccttcagccttttccctatccagtatctcctacatagttaccttttgatcttaaggaactgttttgattgggtcacttccttgcctaaaattccattgattgttcattgttaattctaaaatagagttcaaatttaaaggcatgtaagttcccctgtaacggatttcctctactcccccttccgctgtaatctcccatttttttactgaaatgcttcagtgagcatgggtctttagaggtcttgatatacaattttcctgaagcaggaataccttgctttcctctactagtttaccacaattacagctctcttttaagcctcagaaaaaaatctcacttccgtcttgaagtcttaatccacgctttttatatccatgtgcctactccttctctgaaatctcctatggtttatctttttattcatttaatatcccacgaattgattttattatatattttttatggttgcatgtggtctttctagttatagcaatatacacatacatgcataaatacatatacacctatgtaaatgtgtgttgggagtatgtattcacacacatacatataccccaaggccatgtgtcatctttatcaatatttaagttttggaattgttttgtttgcctcctatatcatggaataaatggtaaagagggctaatttattactctaagtggatttcttattacattaatatcagacatatagaatgtactttgttttactatttgtaagatacaaaggtatataaactgacatacatcagcttgaaacctgagataatgctaaaatgttctaattattttaaatgtttaaagaggacaaccatgtaatgttgctaaacatgaaaaatgtcatcaagtggaataaagaatagctgaagttaacatttgggggaaattgagctgaaaacaaaaatatgagtattttgataccttttctttaccatgagactcttgactatgaagtcaaatttatctaaaggaaaaacaggaattctggagacctgtgtaaaagcagactattatcttcctactgtgagagtactaaaattaaaatacgtttaatgacgttttcctcaatgtaaaagcattgaagtaaatgtttcttttatgttgcagatacatagttgctctagagatcacctttttctttatgcattgtgaatagcagtctgcatcctaagtttaaaatatttgagaatcctctatgggactctctgtaaatgttttaaatactgttgttttcaataaatattttatact

SEQ ID NO: 1746 - protein, 955 aa, Homo sapiens
MSSASVTAFEKEHLWMYLQALGFEPGPATIACGKIVSHTHLGVNMFDKLNRDAFHIISYFLFQVLDQSLTKEVFKFCWPPFDQKSDTEFRKHCCEWIKRISGECGSSFPQVVGSLFLSPGGPKFIHLMYHFARFVAMKYIKSNSKNSSHHFVETFNIKPQDLHKCIARCHFARSRFLQILQRQDCVTQKYQENAQLSVKQVRNLRSECIGLENQIKKMEPYDDHSNMEEKIQKVRSLWASVNETLMFLEKEREVVSSVLSLVNQYALDGTNVAINIPRLLLDKIEKQMFQLHIGNVYEAGKLNLLTVIQLLNEVLKVMKYERCQADQARLTVDLHYLEKETKFQKERLSDLKHMRYRIKDDLTTIRHSVVEKQGEWHKKWKEFLGLSPFSLIKGWTPSVDLLPPMSPLSFDPASEEVYAKSILCQYPASLPDAHKQHNQENGCRGDSDTLGALHDLANSPASFLSQSVSSSDRNSVTVLEKDTKMGTPKEKNEAISKKIPEFEVENSPLSDVAKNTESSAFGGSLPAKKSDPFQKEQDHLVEEVARAVLSDSPQLSEGKEIKLEELIDSLGSNPFLTRNQIPRTPENLITEIRSSWRKAIEMEENRTKEPIQMDAEHREVLPESLPVLHNQREFSMADFLLETTVSDFGQSHLTEEKVISDCECVPQKHVLTSHIDEPPTQNQSDLLNKKVICKQDLECLAFTKLSETSRMETFSPAVGNRIDVMGGSEEEFMKILDHLEVSCNKPSTNKTMLWNSFQISSGISSKSFKDNDFGILHETLPEEVGHLSFNSSSSSEANFKLEPNSPMHGGTLLEDVVGGRQTTPESDFNLQALRSRYEALKKSLSKKREESYLSNSQTPERHKPELSPTPQNVQTDDTLNFLDTCDLHTEHIKPSLRTSIGERKRSLSPLIKFSPVEQRLRTTIACSLGELPNLKEEDILNKSLDAKEPPSDLTR

SEQ ID NO: 1747 - DNA, 4930 bp, Homo sapiens
gagctcaaacttagagctgctatcggaggaggattttagatttaggaaattctcagcagagcatccgaggggcttttgaaaaattcaattctttagacgctcatgaagaaatcagggatttcctcagtgctgggtcctgccaccaccatggttccagtggttgagctttgctgaagcccaggcatcatgtacagtgtagaagacctcctgatctctcatggatacaagctgtcaagagaccccccagcatcacgcgaggataaccccaaggggcgccaggcagcgaggactgggacacgagcaggccagggcctgcagaacgggcatgaggatggccctgcggccctcgcacatcgtaagacgtccgcggggaaaggacatgtgagtgactccgaaagccgccgcagcacaccgagaggccacggggagccccagagcacttctgcttccagaacctcggaggcggggtgcccaatagagaactgaaaattggagggaaacagaaaggttttgtaatcaacccccctcagcatggtcctctcatcccccgactggtaacgaccaagcctaccggagaagaggacggcaagaagccaggagccagaagccgagggagcacgaaaacctggaggccagaggaatggcccaagcccacagcctgcctgtccacgtgagggagggtccatgggaagttggaggaaggtcagagcatgtgatgaagaagccagtttgggaagaagaattgcgaatgtcaggtcctgccaagtggcagaacgtcagcctggaaagctggaaccagccaaggaaattagggaggcagatgtctgatggagatggggagagactgtttcaagacctgtacccattcattcaaggagaacatgtgttgaattctcaaaacaaagggaagtctcgctcactgcctagagttctttcccccgagagcctgagttgcacggaaattcccattccattaaatgaaagacattcacctaaaatgccaccgtatcctcccacttgcgcaccaaatttggactccacgaggaattctgagaagagtggctgctcagccccatttccccggcctaagtttgggaggcccctcaagcccccatcttacagctcgcaccagcagtctaggggaggagcggacagcagtgactctcaggacagccagcagatggacgcctatgtccccaggcatgagctctgcctgtcagaccctggattggaacctccagtgtacgtgcctccgccctcatacagatcgcccccgcagaacatcccaaacccctacttggaagacacggtgcccataaatgtgtgtggcggtcacagtcaacagcagtctccgaccgagaaggctggggccagcggtcagcctccttcaggcccccctggaactgggaatgagtatggtgtgagcccccgcttgcctcaggggctccccgcacatccccgacctgtcactgcctatgacggcttcgttcagtacattccctttgatgatccacggttacgacattttaaactagctcagccccagggtttctgtgaagacataaagcttgacgataaatcatataactccagtcctgtcactgctcaagagccggctcatggaggaatgcagcctgatggtgccatttggaatccacagagcttaatacccccgtcgggggatgagagaggcctggtcttggccgattccagcccccggtggctgtggggccagccccccggggatggggaaaacagtggcctccccaaccagagagaccgctgtgtggcaaggggacagtggcctgatgtgagaggcagccagcacgggcacactggaagacaagtttcctccccttactcacagggcgagagcacctgcgaaactcaaaccaagctcaaaaagttccaaactgggactcggaccaagaaaagttcaaagaaaaaaatgaacgagactatattttgcttggtttctatcccagtgaaatcagaatcacatctgccagatagagatatggacaacaatgacttaaagcccagtgctgatcaaaagaatgggtctgataagagcccggctctgcaagaacagagtctgctgagcatgtcttccaccgacctggagctgcaggccctcacaggaagcatgggtgggagaacggagttccaaaaacaagatctaggggaaccagaagaagacagacaaacaaatgacctcagtttcatccaccttacaaagcacagagaactcaagcattctggctcttggccagggcaccggtacagagatcagcaaacacaaaccagtttctccgaggagccccaaagttcgcagctgctccctggtgcaaagctgggagggccgagtcgtgcagcattgagtccaaaatgttcagaccctgctgcctccgaagctcagacgcacacagcattccctaccggtgatcacaaacagaggccaagtgcccgtaacctgaaaggtcacaggtccctcagcccatccagcaacagtgcgttctcaaggacttccttgtccgtggaccaggcaccgacgccaaaagcaggccgaagtcagccctgcgtggatgtccacgggcttggagcccaccctgggcctaagcgggaggtggtgaagggggagcccacgggcccttgcaacagtaaacaactctttgggcagtttctcctgaaaccggtcagccgtcgtccctgggatttgatcagtcagttagaaagttttaacaaggagctccaggaagaggaagaaagcagcagtagcagcagcagcagcagcagcagcagtgaggagagtgaggcggagccgcagcaggagaaccgtgctcactgcagacaggaggatgtgggcttccgcggaaacagcccggaaatgagggttgagccacagccgaggatgtgggtgccggagagccctgtgtgtaggtcgggaagaggtgagagtaagtctgagagctggagtgaggagctgcagcctggccacccacgtgcctggcctccatccccgggccgctttcgcgtggaagaaggtggcggtgcacctttctgctcagcagatggaagcacgagtgcagagaagagacacctggaggttagcaacggaatggacgagctggcaggtagcccatttcctgtgacgagaatgtcttcaagatcaagtgacgcaaaaccactgcccgcgtcctatccagctgaacctagggagccccaggaaagtccgaaaatcaccagtgctttcagctctgtgaaaccaagtgaagcggtccctcggaagtttgacagtggtggagagaggggggcagggctcccactgtccctgtctaacaagaaccgagggctctcagctccagacttacggtctgtggggctcacccctgggcaagaacagggtgccagtgagctagaggggtctttgggtgaagcaagcacaatagaaatccccccaggtgagtccttgcaagccagggctgcaaggatcctgggcattgaggtggcggtggagtccctcctgccgggcatccggagagcgggacagaaccagcctgctgagcccgatgcaagtgcctgcaccccagagtccccccaggaagagttgctatctcgcccagcaccggcagatgtccccagggtgtccactgatgccttttatggcaggaggaagtgcggctggaccaagagccctctctttgtaggggacagggacagtgccaggcgggctcctcaggcttttgagcactcagatgtggacggggttgtcaccagcacagaccctgtccctgagcctgagcccagccccttggagtccaagttcttcgaacaaaaggatgtggaaacaaaaccacccttcaggtccactttattccattttgtagaaagaaccccaagtgtggcaggctctgaaaagagacttagaagcccttccaaagtgattgaaagtttacaagagaaactggcctccccgcctaggagagcagaccctgaccgcctgatgagaatgaaagaggtgagctcagtgtcacggatgagagtcctgagcttcaggaatgccgactcccaggaggacgccgaggaattgaaggccaccacaaggggccaggccgggctcccgggaggccttgtgtctcctggcagtggggaccgtgcccagagattgggccactcactctctgtgtccaaggacagcatctccagggaagagaaggagcatccggcagcacaaaaggagaagagcatggatcaagacttctggtgcccagattcctatgaccctagcagagtggagagggtgtgatgaaatgccggtggagcttgcattccgttgcgaattgagtattctcaagtagctggtagatttagtctatcagccccacttccccatgtagaagctggaagctgctgagtttttagcatcctgataacattctttaccactgccactaggaaacttgccatcctctcagaattgctttgtggcgataaagcaatcgtccgttgaaaccatctgtttttatagcatgaagatttaatgcctataattaggaaggagttttcacagaaaccctccctcatgacagatttgactaagctggtaaatagtttggtgttgctctcattctgggtgaagatttcaatgtggaagatctagcaaatgctttggaaaggcctgtgaatggtgtgctcccctctgtgtctccatggcctgcagtccatgctcttgtgaaggagtttgggacactggctgttgcccggtgtttcagcactttcagtttaggggaaatgtgaatcaataggtatgatccatttctaatcaatttggccttctgctgctggaagtaactttacttataagtaacttgccatcagagaataaaagcaatatcttttaagttcctgaaaaattaaaacttgtactgta

SEQ ID NO: 1748 - protein, 892 aa, Homo sapiens
MQPDGAIWNPQSLIPPSGDERGLVLADSSPRWLWGQPPGDGENSGLPNQRDRCVARGQWPDVRGSQHGHTGRQVSSPYSQGESTCETQTKLKKFQTGTRTKKSSKKKMNETIFCLVSIPVKSESHLPDRDMDNNDLKPSADQKNGSDKSPALQEQSLLSMSSTDLELQALTGSMGGRTEFQKQDLGEPEEDRQTNDLSFIHLTKHRELKHSGSWPGHRYRDQQTQTSFSEEPQSSQLLPGAKLGGPSRAALSPKCSDPAASEAQTHTAFPTGDHKQRPSARNLKGHRSLSPSSNSAFSRTSLSVDQAPTPKAGRSQPCVDVHGLGAHPGPKREVVKGEPTGPCNSKQLFGQFLLKPVSRRPWDLISQLESFNKELQEEEESSSSSSSSSSSSEESEAEPQQENRAHCRQEDVGFRGNSPEMRVEPQPRMWVPESPVCRSGRGESKSESWSEELQPGHPRAWPPSPGRFRVEEGGGAPFCSADGSTSAEKRHLEVSNGMDELAGSPFPVTRMSSRSSDAKPLPASYPAEPREPQESPKITSAFSSVKPSEAVPRKFDSGGERGAGLPLSLSNKNRGLSAPDLRSVGLTPGQEQGASELEGSLGEASTIEIPPGESLQARAARILGIEVAVESLLPGIRRAGQNQPAEPDASACTPESPQEELLSRPAPADVPRVSTDAFYGRRKCGWTKSPLFVGDRDSARRAPQAFEHSDVDGVVTSTDPVPEPEPSPLESKFFEQKDVETKPPFRSTLFHFVERTPSVAGSEKRLRSPSKVIESLQEKLASPPRRADPDRLMRMKEVSSVSRMRVLSFRNADSQEDAEELKATTRGQAGLPGGLVSPGSGDRAQRLGHSLSVSKDSISREEKEHPAAQKEKSMDQDFWCPDSYDPSRVERV

SEQ ID NO: 1749 - DNA, 2803 bp, Homo sapiens
gactccggagcccgagcccggggcgggtggacgcggactcgaacgcagttgcttcgggacccaggaccccctcgggcccgacccgccaggaaagactgaggccgcggcctgccccgcccggctccctgcgccgccgccgcctcccgggacagaagatgtgctccagggtccctctgctgctgccgctgctcctgctactggccctggggcctggggtgcagggctgcccatccggctgccagtgcagccagccacagacagtcttctgcactgcccgccaggggaccacggtgccccgagacgtgccacccgacacggtggggctgtacgtctttgagaacggcatcaccatgctcgacgcaggcagctttgccggcctgccgggcctgcagctcctggacctgtcacagaaccagatcgccagcctgcccagcggggtcttccagccactcgccaacctcagcaacctggacctgacagccaacaggctgcatgaaatcaccaatgagaccttccgtggcctgcggcgcctcgagcgcctctacctgggcaagaaccgcatccgccacatccagcctggtgccttcgacacgctcgaccgcctcctggagctcaagctgcaggacaacgagctgcgggcactgcccccgctgcgcctgccccgcctgctgctgctggacctcagccacaacagcctcctggccctggagcccggcatcctggacactgccaacgtggaggcgctgcggctggctggtctggggctgcagcagctggacgaggggctcttcagccgcttgcgcaacctccacgacctggatgtgtccgacaaccagctggagcgagtgccacctgtgatccgaggcctccggggcctgacgcgcctgcggctggccggcaacacccgcattgcccagctgcggcccgaggacctggccggcctggctgccctgcaggagctggatgtgagcaacctaagcctgcaggccctgcctggcgacctctcgggcctcttcccccgcctgcggctgctggcagctgcccgcaaccccttcaactgcgtgtgccccctgagctggtttggcccctgggtgcgcgagagccacgtcacactggccagccctgaggagacgcgctgccacttcccgcccaagaacgctggccggctgctcctggagcttgactacgccgactttggctgcccagccaccaccaccacagccacagtgcccaccacgaggcccgtggtgcgggagcccacagccttgtcttctagcttggctcctacctggcttagccccacagagccggccactgaggcccccagcccgccctccactgccccaccgactgtagggcctgtcccccagccccaggactgcccaccgtccacctgcctcaatgggggcacatgccacctggggacacggcaccacctggcgtgcttgtgccccgaaggcttcacgggcctgtactgtgagagccagatggggcaggggacacggcccagccctacaccagtcacgccgaggccaccacggtccctgaccctgggcatcgagccggtgagccccacctccctgcgcgtggggctgcagcgctacctccaggggagctccgtgcagctcaggagcctccgtctcacctatcgcaacctatcgggccctgataagcggctggtgacgctgcgactgcctgcctcgctcgctgagtacacggtcacccagctgcggcccaacgccacttactccgtctgtgtcatgcctttggggcccgggcgggtgccggagggcgaggaggcctgcggggaggcccatacacccccagccgtccactccaaccacgccccagtcacccaggcccgcgagggcaacctgccgctcctcattgcgcccgccctggccgcggtgctcctggccgcgctggctgcggtgggggcagcctactgtgtgcggcgggggcgggccatggcagcagcggctcaggacaaagggcaggtggggccaggggctgggcccctggaactggagggagtgaaggtccccttggagccaggcccgaaggcaacagagggcggtggagaggccctgcccagcgggtctgagtgtgaggtgccactcatgggcttcccagggcctggcctccagtcacccctccacgcaaagccctacatctaagccagagagagacagggcagctggggccgggctctcagccagtgagatggccagccccctcctgctgccacaccacgtaagttctcagtcccaacctcggggatgtgtgcagacagggctgtgtgaccacagctgggccctgttccctctggacctcggtctcctcatctgtgagatgctgtggcccagctgacgagccctaacgtccccagaaccgagtgcctatgaggacagtgtccgccctgccctccgcaacgtgcagtccctgggcacggcgggccctgccatgtgctggtaacgcatgcctgggccctgctgggctctcccactccaggcggaccctgggggccagtgaaggaagctcccggaaagagcagagggagagcgggtaggcggctgtgtgactctagtcttggccccaggaagcgaaggaacaaaagaaactggaaaggaagatgctttaggaacatgttttgcttttttaaaatatatatatatttataagagatcctttcccatttattctgggaagatgtttttcaaactcagagacaaggactttggtttttgtaagacaaacgatgatatgaaggccttttgtaagaaaaaataaaagatgaagtgtg

SEQ ID NO: 1750 - protein, 673 aa, Homo sapiens
MCSRVPLLLPLLLLLALGPGVQGCPSGCQCSQPQTVFCTARQGTTVPRDVPPDTVGLYVFENGITMLDAGSFAGLPGLQLLDLSQNQIASLPSGVFQPLANLSNLDLTANRLHEITNETFRGLRRLERLYLGKNRIRHIQPGAFDTLDRLLELKLQDNELRALPPLRLPRLLLLDLSHNSLLALEPGILDTANVEALRLAGLGLQQLDEGLFSRLRNLHDLDVSDNQLERVPPVIRGLRGLTRLRLAGNTRIAQLRPEDLAGLAALQELDVSNLSLQALPGDLSGLFPRLRLLAAARNPFNCVCPLSWFGPWVRESHVTLASPEETRCHFPPKNAGRLLLELDYADFGCPATTTTATVPTTRPVVREPTALSSSLAPTWLSPTEPATEAPSPPSTAPPTVGPVPQPQDCPPSTCLNGGTCHLGTRHHLACLCPEGFTGLYCESQMGQGTRPSPTPVTPRPPRSLTLGIEPVSPTSLRVGLQRYLQGSSVQLRSLRLTYRNLSGPDKRLVTLRLPASLAEYTVTQLRPNATYSVCVMPLGPGRVPEGEEACGEAHTPPAVHSNHAPVTQAREGNLPLLIAPALAAVLLAALAAVGAAYCVRRGRAMAAAAQDKGQVGPGAGPLELEGVKVPLEPGPKATEGGGEALPSGSECEVPLMGFPGPGLQSPLHAKPYI

SEQ ID NO: 1751 - DNA, 5391 bp, Homo sapiens
gagtgttttcagaagtgggaatagcaggcgaggtcttgaggcctgaagaagcaaagcgtcgcttagtcaatgctgagatgcgtcttgtggaacagaatttttgggacatttgcaggatgagttagatgaactccgtgctgagatggaagagatgagagacagttatttagaggaagatgtttaccagctgcaggaacttcggcgagaactggaccgcgctaataaaaactgccgaatcctgcagtaccgtcttcggaaagccgagcagaaaagcctgaaagtggctgagacgggtcaggtggatggtgagcttattcgaagcctggagcaggacttgaaggtagccaaagatgtatctgtcagattgcaccacgaacttaagacggtggaggaaaagcgcgctaaagctgaggatgaaaacgaaactctccgacagcagatgattgaagtggaaatatccaaacaggccctccagaatgagctggagagactgaaagagagttccctaaaaagaagaagcactcgggaaatgtacaaggagaagaaaacctttaaccaggatgacagtgccgatttgaggtgccagctccagtttgccaaagaggaagccttcctgatgcgcaaaaagatggccaagctaggaagggagaaggacgagctggagcaggagctccagaagtacaagtccctctatggggatgtggacagtcccctgcccacgggggaagcaggcgggccccccagcacccgggaggccgagctgaagctgcggctaaagctggtggaggaggaagccaacatcttgggccggaagatcgtggagctggaggtggagaaccgtggcctcaaggcagagatggaggacatgcggggccagcaggagcgggagggcccgggtcgggaccacgcacccagcattcctacctcacccttcggtgactccctggagtcctccactgagctccgccgccacctgcagtttgtagaagaggaagcggagttgctccggaggtccatctccgagatcgaagaccacaaccggcaactgacccacgagctcagcaagtttaagtttgagcctccccgggagccgggctggctaggagagggtgcaagtcctggtgccgggggtggggcccccctgcaggaggagctgaagtcagccaggctgcagatcagcgagctcagcggcaaggtgctcaaactgcagcacgagaaccacgcgctgctgtccaacatccagcgctgcgacctggcagcccacctggggctgcgtgcccccagtccccgggacagcgatgccgagagtgatgcgggcaagaaggagagtgatggggaggagagccgcctgccccagcccaagcgggaagggcctgttggcggggagagtgactcggaggaaatgtttgagaagacgtcgggcttcgggagcgggaagccatcggaggccagcgagccatgccccacggagctcctgaaggcccgggaggactctgagtacctagtgaccctaaaacacgaggcccagcggctagagcggacggtggagcgcctcatcacggacaccgacagcttcctccatgatgcggggctgcggggtggtgcgcccttaccggggcctggcctccagggcgaagaggagcagggtgagggggaccagcaggagccccagctgctggggaccatcaacgccaagatgaaggctttcaagaaagagctgcaggccttcctggagcaggtgaaccgcattggggatggcctatcccccttgccccacctcacagagtcctctagcttcctctccactgtgacttccgtgtcccgggactcccccatcgggaacctggggaaggagctgggcccagacttgcagtccagactgaaagagcagctggagtggcagctcgggccggcccgaggggacgagcgggagagcctgcgcctccgagccgcgcgggagctgcaccgccgcgcagacggggacaccgggagccacgggctgggaggccagacctgcttcagcctggagctcaggggcccccccgttttacctgagcagagtgtatccatagaggagctacagggtcagctcgtgcaggcggccagactgcatcaagaggagacagagacatttacaaacaagatccataagatggaggaggagcacctctatgccttgaggtggaaagaactggaaatgcacagcctggctttgcaaaacaccctccatgagcgaacctggagtgatgagaagaatctgatgcagcaggagctccggtccttgaagcagaacattttcctcttctacgtcaaactcaggtggctgctgaaacactggcggcaagggaagcagatggaggaggaaggagaggagttcactgagggtgaacatccagagaccctctccaggctcggggagcttggagtccaggggggtcaccaggcggatggcccagaccacgacagtgaccgaggctgtggctttccagtgggggagcactccccacactcccgggtgcagattggagatcacagcttgcggctgcagaccgcggacaggggacagccccacaaacaggtggtggaaaaccagcagctgttcagcgccttcaaggccttgctggaggacttccgtgcggagctgcgggaggatgagcgtgcccgactacggctgcagcagcaatatgccagcgacaaggcggcctgggacgtggagtgggccgtgctcaagtgccgtctggaacagctggaagagaagactgagaacaagttgggagaactaggctcctccgctgagagcaagggggccttgaagaaggagagagaggtgcaccagaagctcctggcagacagtcacagcctggtcatggacctgcgctggcagatccatcacagcgagaagaactggaaccgggagaaggtggaacttctcgaccgcctggacagagatcggcaggagtgggagcggcagaagaaggaattcttgtggaggatagagcagttgcagaaagagaacagtccccggagaggtggcagtttcctctgtgatcaaaaagacggcaacgttcgcccctttccccaccagggaagcctccgcatgccccgtccagtggccatgtggccttgtgcagatgctgactccatcccgtttgaagaccggccgctgtccaagctgaaggagtcggacaggtgctcggccagtgagaatctctacctggatgccttgtccctggatgacgagccagaagagccaccagcccacaggcccgagagggagttcaggaaccgcctccctgaggaagaagaaaatcacaaaggaaatcttcaaagggcggtgtccgtgtcctccatgtctgagttccagcgtctaatggacatctcccccttcctgcctgagaagggcctgccgtccaccagcagcaaggaggatgtcaccccacccctgtctccagacgacctcaagtacatcgaggagttcaacaagagctgggactacacacccaacaggggccacaatggtggggggccggacctttgggccgacaggaccgaggtggggcgggcagggcacgaggacagcacagagcctttccccgactcctcctggtacctaaccacaagtgtcaccatgaccacggacaccatgaccagcccagagcactgccagaagcagccactgcggagccacgtcctcaccgagcagtcggggttgcgcgtgttacacagcccgcctgccgtgcgcagggtcgacagcatcacggcggcaggtggtgagggtccctttcccacaagcagagccagagggagcccgggagacaccaagggaggccctccagaacccatgctcagcaggtggccttgcacctcccccaggcactcccgggactatgtggagggggcacggcgcccccttgatagtcccctctgtacctccctggggtttgcctccccactgcacagcctggagatgtccaagaacttgagtgatgacatgaaggaggtggccttctctgtcaggaatgccatctgctccggccctggcgagctgcaagtcaaggacatggcctgccagaccaatgggtcccggacgatggggacccagactgttcagaccatcagtgtgggcttgcagactgaagccctgcgtggcagcggtgtcaccagcagcccccacaagtgtctcactccaaaggctgggggcggtgctacacccgtgtcgtctccttcccggagccttaggagcagacaggtggcccctgccatcgagaaggtgcaggccaagtttgaacgcacatgctgctcccccaagtatggttctcccaagctgcagaggaagcccctccccaaagccgaccagccaaataacaggacgtcaccagggatggcccagaaagggtacagtgagtcagcctgggcccgctccaccaccacaagggagagccccgtgcacaccaccattaatgatggcctctccagcctcttcaacatcattgaccacagccccgtggtgcaggaccccttccagaaggggctgcgggccggcagtcggtctcgctcagcagagccccgaccagagctgggcccaggccaggaaacaggcaccaattcccgaggaaggtcgcctagccccattggggtggggtcagagatgtgcagggaggaagggggagagggcacgccagtgaagcaggacttatctgctccccctggctacacgctcactgagaacgtggcccggatcctcaacaagaagctgctggaacatgccttaaaggaggagaggaggcaggctgcccacgggcccccgggtctccacagtgacagccactcgctgggggacacagccgagccagggcccatggagaaccaaactgtcttgctaactgccccctggggactctagccctgcccgcctcacgctgaactaccttgttctgcactagctccatccctagagccctgcttctccaggcccgagagaccagcaaaccgtcgccctccgtcccgttgggccccacattcccccactgcctcacagcctcagtcacccggagacccgacgtccttggaggagcatggtggcgaggagccgcccgaggagcagccacaccgagatgcaagcttgcatggattatcacagtataattcactgtaatttgcataaccacaccatcaccatgaacaaaactctgcccaacaggagagatctagttttctcaaggtcaaagaatgttttttaaaaacacaaagctgctgaatgttcaacctgtgaaactgagatgtttctagaatgaaacagtaaatgtgcctgtaataacttaatttttttcatagctcagaaaactatttttgtctccatcttttttacacacagtatattaaacgaaaagg

SEQ ID NO: 1752 - protein, 1586 aa, Homo sapiens
MEEMRDSYLEEDVYQLQELRRELDRANKNCRILQYRLRKAEQKSLKVAETGQVDGELIRSLEQDLKVAKDVSVRLHHELKTVEEKRAKAEDENETLRQQMIEVEISKQALQNELERLKESSLKRRSTREMYKEKKTFNQDDSADLRCQLQFAKEEAFLMRKKMAKLGREKDELEQELQKYKSLYGDVDSPLPTGEAGGPPSTREAELKLRLKLVEEEANILGRKIVELEVENRGLKAEMEDMRGQQEREGPGRDHAPSIPTSPFGDSLESSTELRRHLQFVEEEAELLRRSISEIEDHNRQLTHELSKFKFEPPREPGWLGEGASPGAGGGAPLQEELKSARLQISELSGKVLKLQHENHALLSNIQRCDLAAHLGLRAPSPRDSDAESDAGKKESDGEESRLPQPKREGPVGGESDSEEMFEKTSGFGSGKPSEASEPCPTELLKAREDSEYLVTLKHEAQRLERTVERLITDTDSFLHDAGLRGGAPLPGPGLQGEEEQGEGDQQEPQLLGTINAKMKAFKKELQAFLEQVNRIGDGLSPLPHLTESSSFLSTVTSVSRDSPIGNLGKELGPDLQSRLKEQLEWQLGPARGDERESLRLRAARELHRRADGDTGSHGLGGQTCFSLELRGPPVLPEQSVSIEELQGQLVQAARLHQEETETFTNKIHKMEEEHLYALRWKELEMHSLALQNTLHERTWSDEKNLMQQELRSLKQNIFLFYVKLRWLLKHWRQGKQMEEEGEEFTEGEHPETLSRLGELGVQGGHQADGPDHDSDRGCGFPVGEHSPHSRVQIGDHSLRLQTADRGQPHKQVVENQQLFSAFKALLEDFRAELREDERARLRLQQQYASDKAAWDVEWAVLKCRLEQLEEKTENKLGELGSSAESKGALKKEREVHQKLLADSHSLVMDLRWQIHHSEKNWNREKVELLDRLDRDRQEWERQKKEFLWRIEQLQKENSPRRGGSFLCDQKDGNVRPFPHQGSLRMPRPVAMWPCADADSIPFEDRPLSKLKESDRCSASENLYLDALSLDDEPEEPPAHRPEREFRNRLPEEEENHKGNLQRAVSVSSMSEFQRLMDISPFLPEKGLPSTSSKEDVTPPLSPDDLKYIEEFNKSWDYTPNRGHNGGGPDLWADRTEVGRAGHEDSTEPFPDSSWYLTTSVTMTTDTMTSPEHCQKQPLRSHVLTEQSGLRVLHSPPAVRRVDSITAAGGEGPFPTSRARGSPGDTKGGPPEPMLSRWPCTSPRHSRDYVEGARRPLDSPLCTSLGFASPLHSLEMSKNLSDDMKEVAFSVRNAICSGPGELQVKDMACQTNGSRTMGTQTVQTISVGLQTEALRGSGVTSSPHKCLTPKAGGGATPVSSPSRSLRSRQVAPAIEKVQAKFERTCCSPKYGSPKLQRKPLPKADQPNNRTSPGMAQKGYSESAWARSTTTRESPVHTTINDGLSSLFNIIDHSPVVQDPFQKGLRAGSRSRSAEPRPELGPGQETGTNSRGRSPSPIGVGSEMCREEGGEGTPVKQDLSAPPGYTLTENVARILNKKLLEHALKEERRQAAHGPPGLHSDSHSLGDTAEPGPMENQTVLLTAPWGL

SEQ ID NO: 1753 - DNA, 5268 bp, Homo sapiens
gagtgttttcagaagtgggaatagcaggcgaggtcttgaggcctgaagaagcaaagcgtcgcttagtcaatgctgagatgcgtcttgtggaacagaatttttgggacatttgcaggatgagttagatgaactccgtgctgagatggaagagatgagagacagttatttagaggaagatgtttaccagctgcaggaacttcggcgagaactggaccgcgctaataaaaactgccgaatcctgcagtaccgtcttcggaaagccgagcagaaaagcctgaaagtggctgagacgggtcaggtggatggtgagcttattcgaagcctggagcaggacttgaaggtagccaaagatgtatctgtcagattgcaccacgaacttaagacggtggaggaaaagcgcgctaaagctgaggatgaaaacgaaactctccgacagcagatgattgaagtggaaatatccaaacaggccctccagaatgagctggagagactgaaagagagttccctaaaaagaagaagcactcgggaaatgtacaaggagaagaaaacctttaaccaggatgacagtgccgatttgaggtgccagctccagtttgccaaagaggaagccttcctgatgcgcaaaaagatggccaagctaggaagggagaaggacgagctggagcaggagctccagaagtacaagtccctctatggggatgtggacagtcccctgcccacgggggaagcaggcgggccccccagcacccgggaggccgagctgaagctgcggctaaagctggtggaggaggaagccaacatcttgggccggaagatcgtggagctggaggtggagaaccgtggcctcaaggcagagatggaggacatgcggggccagcaggagcgggagggcccgggtcgggaccacgcacccagcattcctacctcacccttcggtgactccctggagtcctccactgagctccgccgccacctgcagtttgtagaagaggaagcggagttgctccggaggtccatctccgagatcgaagaccacaaccggcaactgacccacgagctcagcaagtttaagtttgagcctccccgggagccgggctggctaggagagggtgcaagtcctggtgccgggggtggggcccccctgcaggaggagctgaagtcagccaggctgcagatcagcgagctcagcggcaaggtgctcaaactgcagcacgagaaccacgcgctgctgtccaacatccagcgctgcgacctggcagcccacctggggctgcgtgcccccagtccccgggacagcgatgccgagagtgatgcgggcaagaaggagagtgatggggaggagagccgcctgccccagcccaagcgggaagggcctgttggcggggagagtgactcggaggaaatgtttgagaagacgtcgggcttcgggagcgggaagccatcggaggccagcgagccatgccccacggagctcctgaaggcccgggaggactctgagtacctagtgaccctaaaacacgaggcccagcggctagagcggacggtggagcgcctcatcacggacaccgacagcttcctccatgatgcggggctgcggggtggtgcgcccttaccggggcctggcctccagggcgaagaggagcagggtgagggggaccagcaggagccccagctgctggggaccatcaacgccaagatgaaggctttcaagaaagagctgcaggccttcctggagcaggtgaaccgcattggggatggcctatcccccttgccccacctcacagagtcctctagcttcctctccactgtgacttccgtgtcccgggactcccccatcgggaacctggggaaggagctgggcccagacttgcagtccagactgaaagagcagctggagtggcagctcgggccggcccgaggggacgagcgggagagcctgcgcctccgagccgcgcgggagctgcaccgccgcgcagacggggacaccgggagccacgggctgggaggccagacctgcttcagcctggagatggaggaggagcacctctatgccttgaggtggaaagaactggaaatgcacagcctggctttgcaaaacaccctccatgagcgaacctggagtgatgagaagaatctgatgcagcaggagctccggtccttgaagcagaacattttcctcttctacgtcaaactcaggtggctgctgaaacactggcggcaagggaagcagatggaggaggaaggagaggagttcactgagggtgaacatccagagaccctctccaggctcggggagcttggagtccaggggggtcaccaggcggatggcccagaccacgacagtgaccgaggctgtggctttccagtgggggagcactccccacactcccgggtgcagattggagatcacagcttgcggctgcagaccgcggacaggggacagccccacaaacaggtggtggaaaaccagcagctgttcagcgccttcaaggccttgctggaggacttccgtgcggagctgcgggaggatgagcgtgcccgactacggctgcagcagcaatatgccagcgacaaggcggcctgggacgtggagtgggccgtgctcaagtgccgtctggaacagctggaagagaagactgagaacaagttgggagaactaggctcctccgctgagagcaagggggccttgaagaaggagagagaggtgcaccagaagctcctggcagacagtcacagcctggtcatggacctgcgctggcagatccatcacagcgagaagaactggaaccgggagaaggtggaacttctcgaccgcctggacagagatcggcaggagtgggagcggcagaagaaggaattcttgtggaggatagagcagttgcagaaagagaacagtccccggagaggtggcagtttcctctgtgatcaaaaagacggcaacgttcgcccctttccccaccagggaagcctccgcatgccccgtccagtggccatgtggccttgtgcagatgctgactccatcccgtttgaagaccggccgctgtccaagctgaaggagtcggacaggtgctcggccagtgagaatctctacctggatgccttgtccctggatgacgagccagaagagccaccagcccacaggcccgagagggagttcaggaaccgcctccctgaggaagaagaaaatcacaaaggaaatcttcaaagggcggtgtccgtgtcctccatgtctgagttccagcgtctaatggacatctcccccttcctgcctgagaagggcctgccgtccaccagcagcaaggaggatgtcaccccacccctgtctccagacgacctcaagtacatcgaggagttcaacaagagctgggactacacacccaacaggggccacaatggtggggggccggacctttgggccgacaggaccgaggtggggcgggcagggcacgaggacagcacagagcctttccccgactcctcctggtacctaaccacaagtgtcaccatgaccacggacaccatgaccagcccagagcactgccagaagcagccactgcggagccacgtcctcaccgagcagtcggggttgcgcgtgttacacagcccgcctgccgtgcgcagggtcgacagcatcacggcggcaggtggtgagggtccctttcccacaagcagagccagagggagcccgggagacaccaagggaggccctccagaacccatgctcagcaggtggccttgcacctcccccaggcactcccgggactatgtggagggggcacggcgcccccttgatagtcccctctgtacctccctggggtttgcctccccactgcacagcctggagatgtccaagaacttgagtgatgacatgaaggaggtggccttctctgtcaggaatgccatctgctccggccctggcgagctgcaagtcaaggacatggcctgccagaccaatgggtcccggacgatggggacccagactgttcagaccatcagtgtgggcttgcagactgaagccctgcgtggcagcggtgtcaccagcagcccccacaagtgtctcactccaaaggctgggggcggtgctacacccgtgtcgtctccttcccggagccttaggagcagacaggtggcccctgccatcgagaaggtgcaggccaagtttgaacgcacatgctgctcccccaagtatggttctcccaagctgcagaggaagcccctccccaaagccgaccagccaaataacaggacgtcaccagggatggcccagaaagggtacagtgagtcagcctgggcccgctccaccaccacaagggagagccccgtgcacaccaccattaatgatggcctctccagcctcttcaacatcattgaccacagccccgtggtgcaggaccccttccagaaggggctgcgggccggcagtcggtctcgctcagcagagccccgaccagagctgggcccaggccaggaaacaggcaccaattcccgaggaaggtcgcctagccccattggggtggggtcagagatgtgcagggaggaagggggagagggcacgccagtgaagcaggacttatctgctccccctggctacacgctcactgagaacgtggcccggatcctcaacaagaagctgctggaacatgccttaaaggaggagaggaggcaggctgcccacgggcccccgggtctccacagtgacagccactcgctgggggacacagccgagccagggcccatggagaaccaaactgtcttgctaactgccccctggggactctagccctgcccgcctcacgctgaactaccttgttctgcactagctccatccctagagccctgcttctccaggcccgagagaccagcaaaccgtcgccctccgtcccgttgggccccacattcccccactgcctcacagcctcagtcacccggagacccgacgtccttggaggagcatggtggcgaggagccgcccgaggagcagccacaccgagatgcaagcttgcatggattatcacagtataattcactgtaatttgcataaccacaccatcaccatgaacaaaactctgcccaacaggagagatctagttttctcaaggtcaaagaatgttttttaaaaacacaaagctgctgaatgttcaacctgtgaaactgagatgtttctagaatgaaacagtaaatgtgcctgtaataacttaatttttttcatagctcagaaaactatttttgtctccatcttttttacacacagtatattaaacgaaaagg

SEQ ID NO: 1754 - protein, 1383 aa, Homo sapiens
MAKLGREKDELEQELQKYKSLYGDVDSPLPTGEAGGPPSTREAELKLRLKLVEEEANILGRKIVELEVENRGLKAEMEDMRGQQEREGPGRDHAPSIPTSPFGDSLESSTELRRHLQFVEEEAELLRRSISEIEDHNRQLTHELSKFKFEPPREPGWLGEGASPGAGGGAPLQEELKSARLQISELSGKVLKLQHENHALLSNIQRCDLAAHLGLRAPSPRDSDAESDAGKKESDGEESRLPQPKREGPVGGESDSEEMFEKTSGFGSGKPSEASEPCPTELLKAREDSEYLVTLKHEAQRLERTVERLITDTDSFLHDAGLRGGAPLPGPGLQGEEEQGEGDQQEPQLLGTINAKMKAFKKELQAFLEQVNRIGDGLSPLPHLTESSSFLSTVTSVSRDSPIGNLGKELGPDLQSRLKEQLEWQLGPARGDERESLRLRAARELHRRADGDTGSHGLGGQTCFSLEMEEEHLYALRWKELEMHSLALQNTLHERTWSDEKNLMQQELRSLKQNIFLFYVKLRWLLKHWRQGKQMEEEGEEFTEGEHPETLSRLGELGVQGGHQADGPDHDSDRGCGFPVGEHSPHSRVQIGDHSLRLQTADRGQPHKQVVENQQLFSAFKALLEDFRAELREDERARLRLQQQYASDKAAWDVEWAVLKCRLEQLEEKTENKLGELGSSAESKGALKKEREVHQKLLADSHSLVMDLRWQIHHSEKNWNREKVELLDRLDRDRQEWERQKKEFLWRIEQLQKENSPRRGGSFLCDQKDGNVRPFPHQGSLRMPRPVAMWPCADADSIPFEDRPLSKLKESDRCSASENLYLDALSLDDEPEEPPAHRPEREFRNRLPEEEENHKGNLQRAVSVSSMSEFQRLMDISPFLPEKGLPSTSSKEDVTPPLSPDDLKYIEEFNKSWDYTPNRGHNGGGPDLWADRTEVGRAGHEDSTEPFPDSSWYLTTSVTMTTDTMTSPEHCQKQPLRSHVLTEQSGLRVLHSPPAVRRVDSITAAGGEGPFPTSRARGSPGDTKGGPPEPMLSRWPCTSPRHSRDYVEGARRPLDSPLCTSLGFASPLHSLEMSKNLSDDMKEVAFSVRNAICSGPGELQVKDMACQTNGSRTMGTQTVQTISVGLQTEALRGSGVTSSPHKCLTPKAGGGATPVSSPSRSLRSRQVAPAIEKVQAKFERTCCSPKYGSPKLQRKPLPKADQPNNRTSPGMAQKGYSESAWARSTTTRESPVHTTINDGLSSLFNIIDHSPVVQDPFQKGLRAGSRSRSAEPRPELGPGQETGTNSRGRSPSPIGVGSEMCREEGGEGTPVKQDLSAPPGYTLTENVARILNKKLLEHALKEERRQAAHGPPGLHSDSHSLGDTAEPGPMENQTVLLTAPWGL

SEQ ID NO: 1755 - DNA, 3962 bp, Homo sapiens
gctttaatagggagatcaagatgaatttgatgtataatcagaatcctagatggaggaggagcacctctatgccttgaggtggaaagaactggaaatgcacagcctggctttgcaaaacaccctccatgagcgaacctggagtgatgagaagaatctgatgcagcaggagctccggtccttgaagcagaacattttcctcttctacgtcaaactcaggtggctgctgaaacactggcggcaagggaagcagatggaggaggaaggagaggagttcactgagggtgaacatccagagaccctctccaggctcggggagcttggagtccaggggggtcaccaggcggatggcccagaccacgacagtgaccgaggctgtggctttccagtgggggagcactccccacactcccgggtgcagattggagatcacagcttgcggctgcagaccgcggacaggggacagccccacaaacaggtggtggaaaaccagcagctgttcagcgccttcaaggccttgctggaggacttccgtgcggagctgcgggaggatgagcgtgcccgactacggctgcagcagcaatatgccagcgacaaggcggcctgggacgtggagtgggccgtgctcaagtgccgtctggaacagaattgttgtggatatcccagaattaacattgaggaggagactttaggcttcaccaggctgccagctgggtccacggtaaaaacgttgaagagccttgggttgcagagattggagctggaagagaagactgagaacaagttgggagaactaggctcctccgctgagagcaagggggccttgaagaaggagagagaggtgcaccagaagctcctggcagacagtcacagcctggtcatggacctgcgctggcagatccatcacagcgagaagaactggaaccgggagaaggtggaacttctcgaccgcctggacagagatcggcaggagtgggagcggcagaagaaggaattcttgtggaggatagagcagggaagcctccgcatgccccgtccagtggccatgtggccttgtgcagatgctgactccatcccgtttgaagaccggccgctgtccaagctgaaggagtcggacaggtgctcggccagtgagaatctctacctggatgccttgtccctggatgacgagccagaagagccaccagcccacaggcccgagagggagttcaggaaccgcctccctgaggaagaagaaaatcacaaaggaaatcttcaaagggcggtgtccgtgtcctccatgtctgagttccagcgtctaatggacatctcccccttcctgcctgagaagggcctgccgtccaccagcagcaaggaggatgtcaccccacccctgtctccagacgacctcaagtacatcgaggagttcaacaagagctgggactacacacccaacaggggccacaatggtggggggccggacctttgggccgacaggaccgaggtggggcgggcagggcacgaggacagcacagagcctttccccgactcctcctggtacctaaccacaagtgtcaccatgaccacggacaccatgaccagcccagagcactgccagaagcagccactgcggagccacgtcctcaccgagcagtcggggttgcgcgtgttacacagcccgcctgccgtgcgcagggtcgacagcatcacggcggcaggtggtgagggtccctttcccacaagcagagccagagggagcccgggagacaccaagggaggccctccagaacccatgctcagcaggtggccttgcacctcccccaggcactcccgggactatgtggagggggcacggcgcccccttgatagtcccctctgtacctccctggggtttgcctccccactgcacagcctggagatgtccaagaacttgagtgatgacatgaaggaggtggccttctctgtcaggaatgccatctgctccggccctggcgagctgcaagtcaaggacatggcctgccagaccaatgggtcccggacgatggggacccagactgttcagaccatcagtgtgggcttgcagactgaagccctgcgtggcagcggtgtcaccagcagcccccacaagtgtctcactccaaaggctgggggcggtgctacacccgtgtcgtctccttcccggagccttaggagcagacaggtggcccctgccatcgagaaggtgcaggccaagtttgaacgcacatgctgctcccccaagtatggttctcccaagctgcagaggaagcccctccccaaagccgaccagccaaataacaggacgtcaccagggatggcccagaaagggtacagtgagtcagcctgggcccgctccaccaccacaagggagagccccgtgcacaccaccattaatgatggcctctccagcctcttcaacatcattgaccacagccccgtggtgcaggaccccttccagaaggggctgcgggccggcagtcggtctcgctcagcagagccccgaccagagctgggcccaggccaggaaacaggcaccaattcccgaggaaggtcgcctagccccattggggtggggtcagagatgtgcagggaggaagggggagagggcacgccagtgaagcaggacttatctgctccccctggctacacgctcactgagaacgtggcccggatcctcaacaagaagctgctggaacatgccttaaaggaggagaggaggcaggctgcccacgggcccccgggtctccacagtgacagccactcgctgggggacacagccgagccagggcccatggaggaactaccttgttctgcactagctccatccctagagccctgcttctccaggcccgagagaccagcaaaccgtcgccctccgtcccgttgggccccacattcccccactgcctcacagcctcagtcacccggagacccgacgtccttggaggagcatggtggcgaggagccgcccgaggagcagccacaccgagatgcaagcttgcatggattatcacagtataattcactgtaatttgcataaccacaccatcaccatgaacaaaactctgcccaacaggagagatctagttttctcaaggtcaaagaatgttttttaaaaacacaaagctgctgaatgttcaacctgtgaaactgagatgtttctagaatgaaacagtaaatgtgcctgtaataacttaatttttttcatagctcagaaaactatttttgtctccatcttttttacacacagtatattaaacgaaaaggtaaataaggtataaatagatttaaaaaataaaagttttaaaaaatgtacattttaagagattctgaacaccctcgctgtcaatacctgactgcctctgttaaatttgcactgttacattttggttcagtttatttccatgttgaattagagtggattaagttaattttattttgtcagtgttactgttttttacgaattttttaatgcttcagactgtctgattcagtgaactttttgtagtgaaaaagccatgaagccagtagacaagacagatattctgtatgctggaggggatacaggatgattttgaaaaggtacaaagtcctcagtgggcttagaaaattcactgtatgatccttatattatcctacttggcttgcacgtcttcgggtgcatgtatataccgctactgtgtcctcgccatcacctaaatgtgactcagtctgttccactgtaatatgttgtgaatttccttgtactgtacttttattgttggtcttcttgcatcgatgatccaacagcaacaccatttttaaattattgtgaaaagattaactggcaatgtacagagtttactcaaagttttcttaagggaaaacactacaaaaagtcacaaggataccaaatggaaacacatgatgatgcctctgggtctgtatgagaccgtgatgaagtagaaataaagcccttctgagatggc

SEQ ID NO: 1756 - protein, 991 aa, Homo sapiens
MEEEHLYALRWKELEMHSLALQNTLHERTWSDEKNLMQQELRSLKQNIFLFYVKLRWLLKHWRQGKQMEEEGEEFTEGEHPETLSRLGELGVQGGHQADGPDHDSDRGCGFPVGEHSPHSRVQIGDHSLRLQTADRGQPHKQVVENQQLFSAFKALLEDFRAELREDERARLRLQQQYASDKAAWDVEWAVLKCRLEQNCCGYPRINIEEETLGFTRLPAGSTVKTLKSLGLQRLELEEKTENKLGELGSSAESKGALKKEREVHQKLLADSHSLVMDLRWQIHHSEKNWNREKVELLDRLDRDRQEWERQKKEFLWRIEQGSLRMPRPVAMWPCADADSIPFEDRPLSKLKESDRCSASENLYLDALSLDDEPEEPPAHRPEREFRNRLPEEEENHKGNLQRAVSVSSMSEFQRLMDISPFLPEKGLPSTSSKEDVTPPLSPDDLKYIEEFNKSWDYTPNRGHNGGGPDLWADRTEVGRAGHEDSTEPFPDSSWYLTTSVTMTTDTMTSPEHCQKQPLRSHVLTEQSGLRVLHSPPAVRRVDSITAAGGEGPFPTSRARGSPGDTKGGPPEPMLSRWPCTSPRHSRDYVEGARRPLDSPLCTSLGFASPLHSLEMSKNLSDDMKEVAFSVRNAICSGPGELQVKDMACQTNGSRTMGTQTVQTISVGLQTEALRGSGVTSSPHKCLTPKAGGGATPVSSPSRSLRSRQVAPAIEKVQAKFERTCCSPKYGSPKLQRKPLPKADQPNNRTSPGMAQKGYSESAWARSTTTRESPVHTTINDGLSSLFNIIDHSPVVQDPFQKGLRAGSRSRSAEPRPELGPGQETGTNSRGRSPSPIGVGSEMCREEGGEGTPVKQDLSAPPGYTLTENVARILNKKLLEHALKEERRQAAHGPPGLHSDSHSLGDTAEPGPMEELPCSALAPSLEPCFSRPERPANRRPPSRWAPHSPTASQPQSPGDPTSLEEHGGEEPPEEQPHRDASLHGLSQYNSL

SEQ ID NO: 1757 - DNA, 5645 bp, Homo sapiens
agaagaggaagattagaagattttttttttctttgagagaaagcccagcggagataaacgaatgtcccctcatctccaaagaaaagttcatcggatttttattctagagagctcatcttcaggatgtcagtgaacatttctactgcaggaaaaggtgtggatccaaatacagttgatacttatgacagtggcgatgattgggaaatcggggttggaaatttaataattgatttggacgctgatttggagaaggacagacagaaatttgagatgaataattccaccaccaccactagtagcagcaactccaaggattgtggaggtccggcctccagtggggctggtgctaccgcagccttagctgatggcctaaaatttgcttctgttcaggcctctgctccccaggggaattcacacaaagagaccagcaaatcaaaagtgaaaaggagtaaaacttctaaggatgctaataaatctctgccttctgctgccttgtatgggattcccgagatcagcagcactggcaagaggcaggaagtccaagggcgccctggagaggcaactggcatgaattcagcgctgggtcaaagtgtgagcagcggcggcagcggcaacccaaacagcaatagtaccagcaccagcacctctgccgccaccgcgggggcaggctcctgtgggaaaagcaaagaggagaagccaggtaaaagccagagcagccgaggcgccaagcgggataaggatgcggggaaatccaggaaggacaagcacgacctgcttcagggccaccagaatggcagtggcagccaggccccttccggggggcacctctatggctttggggccaagagcaatggaggtggcgcgagccccttccactgcgggggcactgggagtggcagcgtcgccgctgcaggggaagttagcaaaagtgccccggattcagggctcatgggaaactctatgttggtaaagaaggaagaggaggaggaggagagccacaggcgaatcaagaaactgaaaactgagaaggttgaccccctgtttacagtgccagcgccaccaccgccgatttccagcagtctcacgcctcagattctaccctcctacttttccccatcttcatccaatattgcagcaccggttgaacagcttttggttcggactcgttctgtgggtgtcaatacatgtgaagttggagtagtgacagagccagagtgtcttgggccctgtgaacctgggaccagtgtgaatttggaagggatcgtgtggcatgaaacagaagaaggtgtcctagtggtcaatgtcacgtggaggaacaaaacgtacgtgggaaccctactggactgcaccaagcacgactgggcccctcccaggttttgtgagtcaccgacaagtgacctggagatgagagggggccggggcagagggaagagagcgaggtctgctgctgctgccccgggctccgaggccagcttcacagagtccagagggctgcagaataagaacagagggggggccaatgggaaagggaggcggggcagcctcaatgccagcggacgaaggacacccccaaattgtgctgctgaggatatcaaagccagcccttcctccaccaacaaaaggaaaaacaagcctccaatggagctggacctgaactccagctctgaggacaataagcctggaaagcgtgtccgcacaaattccagaagcactcccactacccctcaagggaaaccagagactacttttttggaccaaggctgctcttctccagtgttaatcgactgtccccacccaaactgcaacaaaaagtacaagcacattaacggcctgaggtaccaccaggctcatgcacacttagacccagaaaacaagctggagttcgagcctgacagtgaggacaagatctcggactgtgaggaaggattgagtaatgtggcacttgaatgcagtgagccaagcacaagtgtatctgcttatgaccagttgaaggcaccggcatcccctggtgctggaaacccacctgggaccccaaagggaaagagagagctgatgagcaatggcccaggttccattattggtgctaaagctgggaagaattctggcaaaaagaagggccttaacaatgaactgaacaaccttccagtaatctccaacatgacggctgcgttagacagttgctcggcagcagacggcagtttggctgctgagatgcctaaactggaagcagaaggattaattgacaagaaaaatttaggagataaagaaaagggcaaaaaagctaccaactgcaaaacggacaaaaacctctctaaactgaaaagtgcccggcccattgcccctgccccagcccccactcccccgcagctaatcgctatacccactgcaacctttacaacgaccaccactgggacaatacccggactgccctccctcacaacaactgttgttcaggctacaccaaagagtcctccgttaaaacccattcaaccaaagcccacaattatgggagagcccatcaccgtgaacccagctctggtgtcactcaaagacaaaaagaaaaaggagaagcgaaagctaaaggacaaagaagggaaagagacgggaagcccaaaaatggatgccaagctggggaaactagaggactccaagggggccagcaaagatttacctgggcattttttaaaggatcatctcaacaagaatgaagggctggcaaatggactgtcggagtctcaggagagccgcatggccagtatcaaagctgaggccgataaggtttacactttcacagacaacgctcccagcccttccatagggagcgcctcgaggctggaatgcagcactttggtgaacgggcaggcaccaatggcacctctgcatgtgttgacccagaatggggcagagagttcagctgcaaagacaagcagcccggcctattcagacatatctgatgctgctgacgatggtggttctgacagcaggtcggagggtatgagatcaaaggccagttccccatcagatattatttctagtaaggacagtgttgtaaaagggcattcttcaactacagcacaatcatctcaactgaaagagtcccattctccctattaccacagctatgatccttattattctccaagttacatgcaccctgggcaggtcggtgcccctgcagctggaaatagtgggagcacgcagggaatgaagatcaagaaggagtctgaggaagatgctgaaaagaaagacaaggcagagcagttagattctaagaaagtggaccacaattctgcatccttacagcctcagcaccagtcggtgatcacacaaagacatcctgccctggctcagtcactttattatggccagtatgcatatgggctctatatggaccagaagtctctgatggccaccagccctgcctatagacagcagtatgagaagtactatgaggaccagaggctggcagagcagaaaatggcccagactgggagaggagactgtgaaaggaaaagtgagctccccttgaaagagctgggcaaggaggaaactaaacagaaaaatatgccatcggccacaatctcaaaagctccctctactccggagcctaacaaaaaccattctaaactagggccatcagtgcctaataaaactgaggagacaggtaaatcgcagcttctctccaatcaccagcagcagcttcaggccgacagcttcaaagctaagcagatggaaaaccaccagcttattaaggaggctgtagaaatgaagtctgtcatggactctatgaagcagacaggtgtagacccaacctcgagatttaaacaagacccagattcaagaacatggcatcattatgtataccagcccaaatatctggatcagcaaaagtcagaagaacttgatagagagaagaaattaaaagaggatagtccgaggaaaactcctaataaagagagtggtgtgcccagccttcctgtatcgttaacaagcattaaagaggagcccaaagaggccaagcatcctgattctcaatcaatggaggagagcaagctgaaaaatgatgatcgaaagactcctgtgaactggaaggactctcggggaacaagagtggctgtctcctcacccatgagtcagcatcagtcatacatacagtacttgcatgcttatccttacccacagatgtacgaccccagccatcctgcataccgggctgtttctcccgtcctaatgcacagttatcctggggcatatctctctccaggatttcattatcctgtttatgggaagatgtcagggagagaagagacagagaaagtcaataccagccctagcgtcaacacgaaaacaaccactgaatctaaagcactggatttgctccagcagcatgctaaccaataccgcagcaagtctcctgctcctgtggaaaaggctacagctgagcgggaacgggaggcagaaagggaaagggatcgccactcccccttcggccagcggcacctgcacacgcaccaccacacccacgttggcatgggttacccgctaatcccgggtcaatatgacccttttcaaggcttgacctctgctgcccttgttgcctctcagcaggtggctgcccaggcatctgcatctggaatgtttcctggacaaagaagagaataacaagattggacatgtacattgtcatgtgactggatcacatggggaagcgctttatacagacatcagttccatggtgttaatttgaaatgccttaatggcaggcaaaaaccagtcatttcatttttgtaaattacagattttatcacagagtaacaaatgttgctgtaattaaacttctgttttatatatatatacgtatacatatctgtatatatacatatatatatatataaatataaatatattctttactttttgtatcagtaaccaggctcgcacacacagggtctgctgccacgtcgcaaaccactcagtaaaggaaattaaaaatgtatttgtcatgttaaaaagtgttagccacaaaaggctacttactttcttttccttttcctttaaaattgtaaataaataatgttatgtatcagtgtgcctgaaccttgcatatccttcacatatttcccataagcccctcagaaaggctaactgtgatgatgacactttggtacaatttagatgtctatttggtggctcctgttaaagacgcaccagtgtaaaatgttcctgtagtcactgtttgtacttgtgtattgtggaaaaagtacttttggaaggcatggggttgccagtaccacaaaaactgtgttgtatataatgtaaagattaaaatggggaaataatgagcatctgtgaataatgaggtgtcattttttgataatcttgaatggcaaataacccaatagcctgcgtaccagagacatctgtgattgttctattacttgaatagttctacagtctttttttttttttaatgtttacaattatccagttttagaagagagagactttaacgccattgcctggttacttgttttatgctgtaatctagtttattttatgtaaaatgtatattgaatgctttccttttttatacctgccttaaataatttggcaatcagaattaaaaagtttttttttttttaaat

SEQ ID NO: 1758 - protein, 1512 aa, Homo sapiens
MSVNISTAGKGVDPNTVDTYDSGDDWEIGVGNLIIDLDADLEKDRQKFEMNNSTTTTSSSNSKDCGGPASSGAGATAALADGLKFASVQASAPQGNSHKETSKSKVKRSKTSKDANKSLPSAALYGIPEISSTGKRQEVQGRPGEATGMNSALGQSVSSGGSGNPNSNSTSTSTSAATAGAGSCGKSKEEKPGKSQSSRGAKRDKDAGKSRKDKHDLLQGHQNGSGSQAPSGGHLYGFGAKSNGGGASPFHCGGTGSGSVAAAGEVSKSAPDSGLMGNSMLVKKEEEEEESHRRIKKLKTEKVDPLFTVPAPPPPISSSLTPQILPSYFSPSSSNIAAPVEQLLVRTRSVGVNTCEVGVVTEPECLGPCEPGTSVNLEGIVWHETEEGVLVVNVTWRNKTYVGTLLDCTKHDWAPPRFCESPTSDLEMRGGRGRGKRARSAAAAPGSEASFTESRGLQNKNRGGANGKGRRGSLNASGRRTPPNCAAEDIKASPSSTNKRKNKPPMELDLNSSSEDNKPGKRVRTNSRSTPTTPQGKPETTFLDQGCSSPVLIDCPHPNCNKKYKHINGLRYHQAHAHLDPENKLEFEPDSEDKISDCEEGLSNVALECSEPSTSVSAYDQLKAPASPGAGNPPGTPKGKRELMSNGPGSIIGAKAGKNSGKKKGLNNELNNLPVISNMTAALDSCSAADGSLAAEMPKLEAEGLIDKKNLGDKEKGKKATNCKTDKNLSKLKSARPIAPAPAPTPPQLIAIPTATFTTTTTGTIPGLPSLTTTVVQATPKSPPLKPIQPKPTIMGEPITVNPALVSLKDKKKKEKRKLKDKEGKETGSPKMDAKLGKLEDSKGASKDLPGHFLKDHLNKNEGLANGLSESQESRMASIKAEADKVYTFTDNAPSPSIGSASRLECSTLVNGQAPMAPLHVLTQNGAESSAAKTSSPAYSDISDAADDGGSDSRSEGMRSKASSPSDIISSKDSVVKGHSSTTAQSSQLKESHSPYYHSYDPYYSPSYMHPGQVGAPAAGNSGSTQGMKIKKESEEDAEKKDKAEQLDSKKVDHNSASLQPQHQSVITQRHPALAQSLYYGQYAYGLYMDQKSLMATSPAYRQQYEKYYEDQRLAEQKMAQTGRGDCERKSELPLKELGKEETKQKNMPSATISKAPSTPEPNKNHSKLGPSVPNKTEETGKSQLLSNHQQQLQADSFKAKQMENHQLIKEAVEMKSVMDSMKQTGVDPTSRFKQDPDSRTWHHYVYQPKYLDQQKSEELDREKKLKEDSPRKTPNKESGVPSLPVSLTSIKEEPKEAKHPDSQSMEESKLKNDDRKTPVNWKDSRGTRVAVSSPMSQHQSYIQYLHAYPYPQMYDPSHPAYRAVSPVLMHSYPGAYLSPGFHYPVYGKMSGREETEKVNTSPSVNTKTTTESKALDLLQQHANQYRSKSPAPVEKATAEREREAERERDRHSPFGQRHLHTHHHTHVGMGYPLIPGQYDPFQGLTSAALVASQQVAAQASASGMFPGQRRE

SEQ ID NO: 1759 - DNA, 2444 bp, Homo sapiens
agatgtccccggccggcgagagcgggcgccggggttcgctctgagtcgcgtggcaggccgcgctgcgtccaccgctgccgagttcagagccgcgcaccgcccgccgccgcaggtcgggttcccagcgctactcccaagacaccgctcagccatgaagatgcatttctgtatcccggtgtcccagcagcggtccgacgcgctggggggccgctacgtgctgtactccgtgcacctggacgggttcctcttctgcagggtgcgctacagccagctgcacggttggaacgaacagctaaggcgggtctttggaaattgcctgccacccttcccaccaaagtactatctggcaatgaccacagctatggctgatgagaggagggaccaactggaacaatatttgcaaaatgtaaccatggacccaaacgtgttgagaagtgatgtcttcgttgagtttttaaaactggcgcagctgaatacatttgacatcgccaccaagaaagcttatctggacatatttctgcccaatgaacagagtattagaatcgaaattataacatcagacactgctgaaagagtcctagaggtggtgtcacacaaaattggactgtgtcgagagctcttgggctacttcggcctctttctcattcggtttggcaaggagggcaagctctctgttgtgaaaaaattggctgactttgaactcccttatgttagtcttggaagttctgaggtggaaaactgtaaggttggactccgaaagtggtatatggctccatccctcgactccgtgctgatggactgcagggtggcggtagatttgctctacatgcaggcaatacaggacattgaaaaaggatgggccaaacccacacaggcacagaggcagaaattagaagctttccagaaagaagacagtcaaacaaagtttttggagctggcccgggaggtacggcactatggatacctgcagctggatccttgtacctgtgactacccagaatcaggctctggagctgttctttctgttggcaataatgagatcagctgctgcatcaccctgcctgacagccagacccaggacatcgttttccagatgagcagggtgaagtgctggcaggtcactttccttggaactctgctggatacggatgggccccagagaactctcaaccagaacttagagctcagatttcaatacagtgaggatagttgctggcagtggtttgttatttacaccaaacaggcttttttgctgagtagctgcttgaaaaagatgatctcagaaaagatggtaaagctagctgctgagaatacagaaatgcagattgaagttccggaacaaagcaaaagtaaaaaataccacattcaacaaagccagcagaaagactattctagttttctatcaagaaaaagcaagattaagatagctaaagatgactgcgtttttgggaacataaaggaagaagatctctgaagaaagctctcatattttaaaatatccttggaggctatctcaagacagtgaaagaacttggggattcaggtgggctacctaccatcagtggaggaaatttgacctcttcccatttttttggcattaacatggactgtattcatcaaggtattataccacagcactctatggaaatctcaagattagaaaaaaaaaaagaaccaagttatagagttagtttttattttatttttgcacttcgtcatgacagtatagagtttgtttttaatgtctcataaatgacaagtggcaaattcaaatcaactcatataaaactcattctattttttctctaaaatagatctttatatggcttcatgaagtcttttatgtgttttgaatttacataaatgaaagtctcataaaatatcataaagatattttggatcgatttctaaagatgtgactcttcaacggaggagaatagggctctgagaaatggaatcactgaaaaagaaacctgggttctctgatctatccacacagaactagagcaaggaggtgatgaaatactgatctctttcctcacataagtctgagcctaccaatatggatgtactcaaagtgaaacgctgccctgttctctgcttgaccattgttataattttattctgtccttagagtactgaaggcagttcaataatcaacatgctatttggaatgttttaatttggaaagcaataaggctctgcacctgatatcagataccttataattctcttagctttaaaaatatgtatactttctcacaaggtttttccttatctagcttcatttctctcatggtaattaatgtaattatgtatagaattaagaccacaataagggagatgatcagaggaatctgtatagtgtaattagaaaaagtacaatattctaatgttctaactgggttgtatacctaattatataataaatacaaaataattcc

SEQ ID NO: 1760 - protein, 440 aa, Homo sapiens
MKMHFCIPVSQQRSDALGGRYVLYSVHLDGFLFCRVRYSQLHGWNEQLRRVFGNCLPPFPPKYYLAMTTAMADERRDQLEQYLQNVTMDPNVLRSDVFVEFLKLAQLNTFDIATKKAYLDIFLPNEQSIRIEIITSDTAERVLEVVSHKIGLCRELLGYFGLFLIRFGKEGKLSVVKKLADFELPYVSLGSSEVENCKVGLRKWYMAPSLDSVLMDCRVAVDLLYMQAIQDIEKGWAKPTQAQRQKLEAFQKEDSQTKFLELAREVRHYGYLQLDPCTCDYPESGSGAVLSVGNNEISCCITLPDSQTQDIVFQMSRVKCWQVTFLGTLLDTDGPQRTLNQNLELRFQYSEDSCWQWFVIYTKQAFLLSSCLKKMISEKMVKLAAENTEMQIEVPEQSKSKKYHIQQSQQKDYSSFLSRKSKIKIAKDDCVFGNIKEEDL

SEQ ID NO: 1761 - DNA, 2025 bp, Homo sapiens
aaaatagaagagactcactctgaaaccaccattccagaaacccgggcagggctcggctgtccctctggctcccagattcttttggcggctctcgctttgggaggctctcacattcctctgcagatctgccccttcctccttcctcctcttgctcctgggccactgggttttcaaaaatccggaaaatccaagaggggcaaggagaaaagcagcagccgcctgaatcgagtccaagggtggatgtgtccggcttcacaacgagccaggccgggaaaacaaggactgaggcttacacaacaggccgccaactcttcgaccccggctgcgcagccggagcccccgccggctcgggcgccctctccccgccccagaagtggccagccccaaccccggaggaaggagggggcgcgacgaggctgtcgggcgacttctagccactcgctgagtggtctcttttgtttgcctaattcctcagcagtttctgagcctgacgctgaccctgctctgaatcccaggaaccccgtccaaaggtaaccccagcagaaaccggttcctcacccgggacttacgacccccgatcaccaccctcgcgtgcacgcacacactcaacagtttggagtttggagagtgagctccggcgagcagatggcgcggccagccgtctgtccgtccgtcctcctctccgccctgcggggcccggccagtggggggcgggctgcgcccccagcctgccttccccggcgctcgcagaccctccgctccgccagcgagaaggcagctccaaaacaaaaaggcgattccgggaggtggcgtcctgaggaaggaggggatcgccaaaggggagggtcccaggccgtccaggtcttggggcgccgcggcggaaatcgcgcggatgccagaacgcgctctcagcttcgggtcctgcggctgcggctgccgccatcatggtgcggaagcttaagttccacgagcagaagctgctgaagcaggtggacttcctgaactgggaggtcaccgaccacaacctgcacgagctgcgcgtgctgcggcgttaccggctgcagcggcgggaggactacacgcgctacaaccagctgagccgtgccgtgcgtgagctggcgcggcgcctgcgcgacctgcccgaacgcgaccagttccgcgtgcgcgcttcggccgcgctgctggacaagctgtatgctctcggcttggtgcccacgcgcggttcgctggagctctgcgacttcgtcacggcctcgtccttctgccgccgccgcctccccaccgtgctcctcaagctgcgcatggcgcagcaccttcaggctgccgtggcctttgtggagcaagggcacgtacgcgtgggccctgacgtggttaccgaccccgccttccttgtcacgcgcagcatggaggactttgtcacttgggtggactcgtccaagatcaagcggcacgtgctagagtacaatgaggagcgcgatgacttcgatctggaagcctagcggatctcccactttgcatggctgtcttttacagatgggaaaactgaggcctgatgctggagattctatgagggtgctctcctcaagggtatcagacggtcgtaggttcttaagaatttgattcatcagtggcaggccatgcatagagccacgggaggtgcgtccttgttttccagggaatgttcttagaacttggactactgattattaattgactgtgccttgggaaacagtgggaagtaacttggtgcagcactggggtattgttggcttcttgtgttggaaactttgtaatgtaaaaggaaaaactggaaatccccacgccctgtttccctttatcgtcttgtggttggactggttcaattcgtttaactcgaattcttgctcctggccgtggttaagctgtgtacagatgatggagagtttggcctcaagtttttataaactgagcgagactagtgttcaggatctcctcccttgtttaaatgtcaataaatgccccaactgctttgtaagtgcaactttt

SEQ ID NO: 1762 - protein, 184 aa, Homo sapiens
MVRKLKFHEQKLLKQVDFLNWEVTDHNLHELRVLRRYRLQRREDYTRYNQLSRAVRELARRLRDLPERDQFRVRASAALLDKLYALGLVPTRGSLELCDFVTASSFCRRRLPTVLLKLRMAQHLQAAVAFVEQGHVRVGPDVVTDPAFLVTRSMEDFVTWVDSSKIKRHVLEYNEERDDFDLEA

SEQ ID NO: 1763 - DNA, 1031 bp, Homo sapiens
cgcgctctcagcttcgggtcctgcggctgcggctgccgccatcatggtgcggaagcttaagttccacgagcagaagctgctgaagcaggtggacttcctgaactgggaggtcaccgaccacaacctgcacgagctgcgcgtgctgcggcgttaccggctgcagcggcgggaggactacacgcgctacaaccagctgagccgtgccgtgcgtgagctggcgcggcgcctgcgcgacctgcccgaacgcgaccagttccgcgtgcgcgcttcggccgcgctgctggacaagctgtatgctctcggcttggtgcccacgcgcggttcgctggagctctgcgacttcgtcacggcctcgtccttctgccgccgccgcctccccaccgtgctcctcaagctgcgcatggcgcagcaccttcaggctgccgtggcctttgtggagcaagggcacgtacgcgtgggccctgacgtggttaccgaccccgccttccttgtcacgcgcagcatggaggactttgtcacttgggtggactcgtccaagatcaagcggcacgtgctagagtacaatgaggagcgcgatgacttcgatctggaagcctagcggatctcccactttgcatggctgtcttttacagatgggaaaactgaggcctgatgctggagattctatgagggtgctctcctcaagggtatcagacggtcgtaggttcttaagaatttgattcatcagtggcaggccatgcatagagccacgggaggtgcgtccttgttttccagggaatgttcttagaacttggactactgattattaattgactgtgccttgggaaacagtgggaagtaacttggtgcagcactggggtattgttggactggttcaattcgtttaactcgaattcttgctcctggccgtggttaagctgtgtacagatgatggagagtttggcctcaagtttttataaactgagcgagactagtgttcaggatctcctcccttgtttaaatgtcaataaatgccccaactgctttgtaag

SEQ ID NO: 1764 - protein, 184 aa, Homo sapiens; identical to SEQ ID NO: 1762

SEQ ID NO: 1765 - DNA, 1470 bp, Homo sapiens
gtctacgtcccctttctcatcgtcggctccatcttcattgcgttcatcatcctgggctctgtagtggctatttattgttgcacctgtttgagacccaaggagccctcgcagcagccaatccgcttctcactccgcagctatcagacagagaccctgcccatgatcctgacctccaccagccccagggcaccctcccggcagtccagcacagccacgagctccagctccacaggcggctccatccgcaggttctcctttgccagggctgagccgggctgcctggtgccctcaccgcccccgccatacaccaccagccactcaatccacctggctcagccatctggtttcctggtgtcaccccagtatttcgcttaccccctccagcaggagcccccactgcctgggaagagctgtccagacttcagttccagttgacacgcccaggccatgaatccacaactcagtcagatggcagacaggtggagccctgctcccattgccacatgcaattctgagaaaatttcccttgtaactgatcagtgtcatggaggagcatgctaggaaaacacagcaccttctaatttgaaagttcctgtctccaatcacagaaaggctaaaccagagaactgttttctggttttgcaaacatgtgatcattacatttcaatctatgctacttttattcaaaatatgcagcagtttgactttaaagttgcaaactggctaaaaacgttttactggacattcagctatattgcttagaaaagggctacatgtttctttttcatataagttgttcattgagttatgataggaatatattcataaataagcaaagaaaaatacctaattgtaattatcaaaggttcacttaaaaaattaactattaggtaaacttaagggggcagtgaaaaatctatttatgatttcgggagtaacctaaccatgaataatattagcataatgagaacatttactttttaaataaataactaaattttgtttacaatatgagtttttccagaatacaaggtttcaataatcacatgaggagtttaaagttttaaatatatactcagacattcattgtaacacagagtgtatgtaaaatcatttcccccactcactggagggagtatttattgcagactttttgttcagcaacatttagtgtttcagtgaaagttggacagttggggcttaaaacatttatttgtaaaatgagctatgttcaaatgtaaatatttgtaatttaatgtatttaccacattgactgtactaattatttagtagtcatactgtaatttttatgttaataataactggagttcaaagtctagctattggtataatcatctaatattatatatatctccagtgcccctgaattttatgtttgatgactatatatttgggcatatatcttgttggattagaataaataaaacactttatattttcatgaactct

SEQ ID NO: 1766 - protein, 143 aa, Homo sapiens
YVPFLIVGSIFIAFIILGSVVAIYCCTCLRPKEPSQQPIRFSLRSYQTETLPMILTSTSPRAPSRQSSTATSSSSTGGSIRRFSFARAEPGCLVPSPPPPYTTSHSIHLAQPSGFLVSPQYFAYPLQQEPPLPGKSCPDFSSS

SEQ ID NO: 1767 - DNA, 609 bp, Homo sapiens
acactcagtctctgattttatccctgccctggcttaattaagtgctctgaagacataaataggttttttgtttactcaagcttgggagaagctggcagaaaaggccttttcagctaaaagctccttacagccggaaggtgtgaagcggcaagtttccagccgggaagaagcctctcagccgtaggcgtctttgcccggagctgtgagcccccctcccaactcccaaatcccccggcgtcggagatgaggccccggatgctgccagtgttctttggggagagcatcaaggtgaacccggaacccacgcatgagatccgctgcaactctgaggtcaagtacgcctcggagaagcatttccaggacaaggtcttctatgcgcccgtacccaccgtcacggcctacagcgagaccatcgtggcagcacccaactgcaccctgggccggcccagccgctggttcaccgccagcctcggcctggcactcgggcaggaggcgggaagggaggctgccagaccaaggacccgtgtggaaggaggcggctccccgctgcctgccctgacctacaggctaggtggtggtctccttgttttggtgtcaaggactcagtaa

SEQ ID NO: 1768 - protein, 121 aa, Homo sapiens
MRPRMLPVFFGESIKVNPEPTHEIRCNSEVKYASEKHFQDKVFYAPVPTVTAYSETIVAAPNCTLGRPSRWFTASLGLALGQEAGREAARPRTRVEGGGSPLPALTYRLGGGLLVLVSRTQ

SEQ ID NO: 1769 - DNA, 684 bp, Homo sapiens
gtgcgggtaaccgagacgccagtactagggctgtggtggccctcctccccatcgattgtccccgggcgcgcagctctcgccccgccgccgcctgccccgggccccggagcgcggtggagaagcccccggaggagcggggggcccgcgccccgcgccccccagacatggtgggccacctgcatctgcagggcatggaggacagcctcctcggagcccccgggacccagcgaggccagagcgcccccctcccaactcccaaatcccccggcgtcggagatgaggccccggatgctgccagtgttctttggggagagcatcaaggtgaacccggaacccacgcatgagatccgctgcaactctgaggtcaagtacgcctcggagaagcatttccaggacaaggtcttctatgcgcccgtacccaccgtcacggcctacagcgagaccatcgtggcagcacccaactgcacgtggcgcaactaccgcagccagctgaccctggagccacgcccgcgcgccctgcgcttccgcagcaccaccatcatcttccccaagcatgccaggagcactttccggaccaccctgcactgcagcctgggccggcccagccgctggttcaccgccagcgtgcagctgcagctttgccaggaccctgcccccagcctcctgggccctgccacgctctga

SEQ ID NO: 1770 - protein, 135 aa, Homo sapiens
MRPRMLPVFFGESIKVNPEPTHEIRCNSEVKYASEKHFQDKVFYAPVPTVTAYSETIVAAPNCTWRNYRSQLTLEPRPRALRFRSTTIIFPKHARSTFRTTLHCSLGRPSRWFTASVQLQLCQDPAPSLLGPATL

SEQ ID NO: 1771 - DNA, 935 bp, Homo sapiens
cacacacccatctgctcactcaccctggcacattcagcccccctaacccaccttgaacattgaccaccacacactccctggcacgctcttctcaccctcaacttctgccacctctccctgggcaatactgccagcctttccctaatctcagagctgcagccctgccctgtcactcacctcaaacctgccatgtccctggggctactgaaattccaggcagtgggtgaagaggacgaggaggatgaggagggggagagcctggactctgtgaaggcactgacagccaagctgcagctgcagactcggcggccctcatatctggagtggacagcccaggtccagagccaggcctggcgcagggcccaagccaaacctggaccagggggacctggggacatctgtggtttcgactcaatggactccgcccttgagtggctccgacgggagctgcgggagatgcaggcgcaggacaggcagctggcagggcagctgctgcggctgcgggcccagctgcaccgactgaagatggaccaagcctgtcacctgcaccaggagctgctggatgaggccgagctggagctggagctggagcccggggccggcctagccctggccccgctgctgcggcacctgggcctcacgcgcatgaacatcagcgcccggcgcttcaccctctgctgaggaacacctgtgccccccgactccccgccccctctcccaatgccgcttcccctgcctgcctgggaagaggaaagggaggggtgccccagaggcaccagctcctggcgggggaggaggaacattcaggtttctgagagctgaattccaagagtgcaaaaccccagcatcctgtttcctctgctgacccagctgggagggggaggaggaggagctcacaccctcaaactcctcaataaacgctttctctggttccc

SEQ ID NO: 1772 - protein, 74 aa, Homo sapiens
MQAQDRQLAGQLLRLRAQLHRLKMDQACHLHQELLDEAELELELEPGAGLALAPLLRHLGLTRMNISARRFTLC

SEQ ID NO: 1773 - DNA, 3788 bp, Homo sapiens
atcccggctcctgcatccagtcgccattcgggaggccgctgcgctgcagggcctcgcggagccgcccgcgaccgcgagccgggccctccgcgcggtccatcgcccactggacgccgcccgcggccggaccggttcaacttctcatctttgttcttcttcatatactataggctgtttgctgtggtttagtcaaaaagccatgtagaatgcctgccttttgaagaccacttttaaggtgtctagtaagacagcagcagtattgaaagtttttaaagaatataaccgtgtgtgttggtaacagacagaagaatggaagcattccaggaacttcgtaaaccatcagcacgtttggagtgtgaccattgcagtttcagaggcacagactatgaaaatgtacaaatccatatgggtaccatccatccagaattttgtgatgaaatggatgctggtgggctaggcaaaatgatattttaccagaaaagtgcaaagttatttcactgccataaatgcttcttcaccagcaagatgtactctaatgtatactatcacatcacatccaaacatgcatccccagacaaatggaatgataaaccaaaaaatcagttgaacaaagaaacagatcctgtgaaaagccctcctcttcctgaacaccagaaaataccctgcaattcagcagaaccaaaatccatacctgccctttcaatggaaacacagaaacttggttcagttttgtctccagaatcgccaaaacctactcctcttactcccctggagcctcagaaacctggctctgttgtttctcctgagctacagacacctcttccttctcctgagccttcaaaacctgcctctgtttcttctcctgaacctccaaaatcagtccctgtttgtgagtctcagaaacttgcccctgttccttctccagaaccacagaaacctgcccctgtatctcctgagtcagtaaaggctactcttagtaatcccaaaccccagaagcagtctcatttcccggaaacattggggccaccttcagcctcatctccagagtcaccagttctagctgcttccccagaaccttggggaccatccccagctgcatctccagaatctcggaagtcagcccggactacctcccctgagccaaggaagccatccccttcagagtctcctgaaccttggaagccgttccctgctgtctccccagagcctaggagaccagcccccgctgtgtcaccaggctcttggaaaccagggccacctgggtcccctaggccttggaaatccaatccttcagcatcatcaggaccttggaagccagctaaacctgctccatctgtgtctcctggaccttggaaaccaattccttctgtatctcctggaccttggaaaccaactccatctgtgtcttctgcatcctggaaatcttcatcagtctcacccagctcctggaagtctccccctgcatctcctgagtcatggaagtctggcccaccagaactccgaaagacagctcccacgttgtctcctgaacattggaaggcagttcccccagtgtctccagagcttcgcaaacccggcccaccactatccccagagatccgtagtccagcaggatctccagagctcagaaaaccctcagggtcaccagatctttggaagctttctcctgatcagcggaaaacttctcctgcttcacttgatttccctgagtcccagaaaagttcccgtggtggttctcctgatctctggaagtcttccttttttattgagcctcagaaacctgtcttccctgagacccgaaaaccaggtccttctgggccatctgagtcccccaaagcagcctcagatatctggaagcctgttctctctatcgatactgagcctagaaaacctgccctgtttcccgagcctgccaaaacagcccctcctgcttctccagaagcacgcaaacgtgccctttttccagagccccggaagcatgcccttttccctgaactccccaaatctgctctattctcagaatcacagaaggctgttgagcttggtgatgaactacaaatagatgccatagatgatcaaaaatgtgatattttggttcaggaagaacttctagcttcacctaagaaactcttagaagatactttatttccttcctcaaagaagctcaagaaagacaaccaagagagctcagacgctgagcttagtagtagtgagtacataaaaacagatttggatgcgatggatattaagggccaggaatcaagcagtgatcaagagcaggttgatgtggaatccattgattttagcaaagagaacaaaatggacatgactagtccagagcagtctagaaatgtgctacagtttactgaagaaaaagaagcttttatctctgaagaggagattgcaaaatacatgaagcgtggaaaaggaaagtattattgcaaaatttgttgctgtcgtgctatgaaaaaaggtgctgttttgcatcatttggttaataagcataatgttcatagcccttacaaatgcacaatctgtggaaaggcttttcttttggaatctctccttaaaaatcatgtagcagcccatgggcaaagtttacttaaatgtccacgttgtaattttgaatcaaatttcccaagaggttttaagaaacatttaactcattgtcaaagccggcataatgaagaggcaaataaaaagctaatggaagctcttgaaccgccactggaggagcagcaaatttgataacacagtgtgaatatttgttctacaaaggtgtttgttggaaccattctttgtaagtatagcttatcagatagcatagttggatcagtagatgacatgtatggtgtaccgtgtttcactgtctcagttgtgttactaagaatgagcatttgatcatttttttctggtctctgtctatgtgactatcttgtaagtcaataaatttctgtatagtccagatggattaaacttctcatttcttttaaatatgtatgaataataatacaaggaagtaggcattccatttaataatcaagagcaagttgtactcaaagcattcagttaaagtgtatctgtgtgtggaactaatttcagacaatagaaaatattagttgaaatgtttaagaattaggcatgaaaaataaatttgagaaattttgtttccttacatgtatttttaaatcataagagttattttctatctgatgtaaaattagtttataaatcttaatcagcttctagatgtttattagcttttatgtcatgaaatgttggagtctcagggttgctgattttctgctaatgggaaaaattgactaagtctttaaaatagtttgcagccttctcccacaggagacaagtgaaagataagtgtgattttagatctttcttgtccatagttgttttcagtggagtcttccattctgtatcttaccctaagatctggttcttccctccccatccccaccccccacccaccgcctgccagctcacactaatagatgattcttaattgccaaatgtgttagagtttgtatatcctactcctgggccttacatgtcgcctgttggggcttaagaccaggttgataagtaggaactgaaagtcttccagattcacagtagaaaattttatagacatttctgttaaagaaatatatcgattttatgtttttcaattatgttactgtaaataccttgtacctgttcatggattattttattctaaaatattttgtcaaatgtgtatcaaccaaattaaaaagaaaggttttcatgtc

SEQ ID NO: 1774 - protein, 821 aa, Homo sapiens
PCVLVTDRRMEAFQELRKPSARLECDHCSFRGTDYENVQIHMGTIHPEFCDEMDAGGLGKMIFYQKSAKLFHCHKCFFTSKMYSNVYYHITSKHASPDKWNDKPKNQLNKETDPVKSPPLPEHQKIPCNSAEPKSIPALSMETQKLGSVLSPESPKPTPLTPLEPQKPGSVVSPELQTPLPSPEPSKPASVSSPEPPKSVPVCESQKLAPVPSPEPQKPAPVSPESVKATLSNPKPQKQSHFPETLGPPSASSPESPVLAASPEPWGPSPAASPESRKSARTTSPEPRKPSPSESPEPWKPFPAVSPEPRRPAPAVSPGSWKPGPPGSPRPWKSNPSASSGPWKPAKPAPSVSPGPWKPIPSVSPGPWKPTPSVSSASWKSSSVSPSSWKSPPASPESWKSGPPELRKTAPTLSPEHWKAVPPVSPELRKPGPPLSPEIRSPAGSPELRKPSGSPDLWKLSPDQRKTSPASLDFPESQKSSRGGSPDLWKSSFFIEPQKPVFPETRKPGPSGPSESPKAASDIWKPVLSIDTEPRKPALFPEPAKTAPPASPEARKRALFPEPRKHALFPELPKSALFSESQKAVELGDELQIDAIDDQKCDILVQEELLASPKKLLEDTLFPSSKKLKKDNQESSDAELSSSEYIKTDLDAMDIKGQESSSDQEQVDVESIDFSKENKMDMTSPEQSRNVLQFTEEKEAFISEEEIAKYMKRGKGKYYCKICCCRAMKKGAVLHHLVNKHNVHSPYKCTICGKAFLLESLLKNHVAAHGQSLLKCPRCNFESNFPRGFKKHLTHCQSRHNEEANKKLMEALEPPLEEQQI

SEQ ID NO: 1775 - DNA, 3788 bp, Homo sapiens; identical to SEQ ID NO: 1773

SEQ ID NO: 1776 - protein, 812 aa, Homo sapiens
MEAFQELRKPSARLECDHCSFRGTDYENVQIHMGTIHPEFCDEMDAGGLGKMIFYQKSAKLFHCHKCFFTSKMYSNVYYHITSKHASPDKWNDKPKNQLNKETDPVKSPPLPEHQKIPCNSAEPKSIPALSMETQKLGSVLSPESPKPTPLTPLEPQKPGSVVSPELQTPLPSPEPSKPASVSSPEPPKSVPVCESQKLAPVPSPEPQKPAPVSPESVKATLSNPKPQKQSHFPETLGPPSASSPESPVLAASPEPWGPSPAASPESRKSARTTSPEPRKPSPSESPEPWKPFPAVSPEPRRPAPAVSPGSWKPGPPGSPRPWKSNPSASSGPWKPAKPAPSVSPGPWKPIPSVSPGPWKPTPSVSSASWKSSSVSPSSWKSPPASPESWKSGPPELRKTAPTLSPEHWKAVPPVSPELRKPGPPLSPEIRSPAGSPELRKPSGSPDLWKLSPDQRKTSPASLDFPESQKSSRGGSPDLWKSSFFIEPQKPVFPETRKPGPSGPSESPKAASDIWKPVLSIDTEPRKPALFPEPAKTAPPASPEARKRALFPEPRKHALFPELPKSALFSESQKAVELGDELQIDAIDDQKCDILVQEELLASPKKLLEDTLFPSSKKLKKDNQESSDAELSSSEYIKTDLDAMDIKGQESSSDQEQVDVESIDFSKENKMDMTSPEQSRNVLQFTEEKEAFISEEEIAKYMKRGKGKYYCKICCCRAMKKGAVLHHLVNKHNVHSPYKCTICGKAFLLESLLKNHVAAHGQSLLKCPRCNFESNFPRGFKKHLTHCQSRHNEEANKKLMEALEPPLEEQQI

SEQ ID NO: 1777 - DNA, 4121 bp, Homo sapiens
gagagaagtacacacgcaccccctcactgcctactcctgctttcgggagcctgagtcattcctgccccctcgtagggttccccatttcccggtgcgcgggcaccctgagacagccttgggaattcgttcgcgtccccttccacctgggtccccttccccagtttgcgccccgtaacactcagccaaggacttcctgtgggtcccaggtcaggggccaaggggtcctggaccgctgccacagccccggtgcgcccgggggaggcgcttccttttcctgaactctgggatcctgcgggaggaagtggggaagttgggcgggggtgcagccgagggcgtgccgactgtggaggggccgaccctcgcgcagctctgggccttccttggggaggagctggggtgccagaggcccaggctgaggagcttggcggcgaggtatttggggaagtaaggcctggggtggagaagcgcggaggaatgggccgggcccggctgggaaggcagccctctcccatccacaggtctccctgggttctggcaggagcctgcccctgctgccggcctggcttacttgtccctacttgtcaacaccctggcagcggggtcttcacctggttccagccccttttccccaaggcggcagagaggatggggctgaggagtctgggaaggggccatgggagtccctgctgagctcggggcaggaagtttctgggttgcatcttagccggccccagggagtgcagagccagggagaggggtaccagggacaaaccctagacagacggccctgtccacggttgctcctgctctcctaggaggccccgtgtgggccgcggcccggccctcaccatggagtccatgttcgaggacgacatcagcatcctgacgcaggaggccctggggcctagtgaggtgtggctggacagtcccggagacccctcgcttgggggcgacatgtgctccgcctcccactttgccctcatcactgcttacggagacatcaaggaacggctggggggcctggagagggagaacgccaccctccgacgccgcctcaaagtctacgagatcaagtacccactgatcagtgactttggagaggagcatggcttttctctgtatgaaatcaaggatggctccctgctggaggtggagaaggtcagcctgcagcaacggctcaaccagttccagcatgagttacagaagaacaaggagcaggaagaacagcttggagagatgatccaggcctacgagaaactctgcgtggagaagagtgacttggagacagagctgagggagatgagggccctggtggagacgcacctgcgtcagatctgtggtttggagcagcagctgcggcaacagcaaggcctccaggatgcagccttctccaacctgagcccaccgccagcccccgcccctccctgcactgatttagacctgcactacctggcactgagagggggatctggcttgagtcatgcaggctggccgggctccacacccagtgtgagtgacctggagcggcggcggctagaagaggctttggaggccgcgcagggagaggcccggggggctcagctccgggaggagcagctccaggccgagtgcgagcggctgcagggggagctgaagcagctgcaggagacccgggcccaggatctggcctccaaccagtcggagcgagacatggcgtgggtgaaaagagttggggatgatcaggtgaatttggcgctggcctacaccgagctgacggaggagctgggccggcttcgggagttgagttccctacaggggagaatcttgaggactctgttgcaggaacaggcccggagtggcggccagaggcactcgccgctgtcacaacgccactccccggccccccagtgcccctccccctccccgcctgcccgagcggctcccccgtgccccccgtgccagtcccccgtcccccagcgccgctctcccgtgcccccgtgcccctcgccgcagcagcgccgctctccggcctcaccctcctgcccgtcgcccgtcccgcagcgccgctcgccggtgccgccgtcgtgccagtcccccagcccgcagcgccgttccccggtgccccccagctgcccggccccgcagccccggccaccgccgccgcccccgccgggcgagaggacgctggccgagcgcgcctacgccaagccgcccagccaccacgtgaaggccggcttccagggccgccgcagctactctgagctggcggagggcgcggcctacgcgggcgcctccccgccctggctgcaggccgaagcggccactctccccaagccccgggcctacggcagcgagctctacggccctggcaggcccctcagcccgcggcgcgccttcgagggcatccggctgcgcttcgagaagcagccgtcggaggaggacgagtgggctgtgcccaccagcccgcccagcccggaggtgggcaccatccgctgcgcctccttctgcgcgggcttccccatccccgagtcgcccgccgccaccgcctacgcccacgccgagcacgcgcagtcctggccgtccatcaacttgctgatggagacggtgggctccgacatccgcagctgccccctctgccagctgggtttccctgtcgggtacccggatgatgccctcatcaaacacattgactcccacctggagaacagcaagatctagggcaccagccccacccactggctgtttctccgtcctctcctatcacccccaaacactcactttgaatgctgcatgaatctcgtggggggtccctgcccttgcgacccccagatacctccacttgctaccgagtcaacgtgtgtgccatcttccctggtccaggcaccactcagctctggctcttcctgggaggtcagccgaggctccccccatgctcctggtttctgcttaggaggtggggacttgggctgggatggggacggcatacccctcccaggcctctccctctgcctttctgttcttaatcagggttggatccaagaaggtgtccagtgcttgggcctggggtggggggaaggtgttagaggactccaggagctcctgcacccctccccaaatgtccatctttctcagacggggctctgtctggggagcacccacaggctgcctttggggtcccagagcctgctctgtgcactgaccccagttcctccatcctgtggccagcctagggctcatggcatgggcccccactgggggagggaggcatcttgtttcttgtggttccctgcaggccagtcctgtcctcctttccctgttctgcccactctggggaatagggaggggaggagaggagaggagagggaggatcctggaggactgggaagatctagcctaaagaggcttctctgagggccagggccctacagcatgcccctacggccaggggactgtctgccagcctcccaggcccatgccctcctggtgcccctggcactgaggcacagatcgtcaaggcaggtaccccctcaacccttcttccactggagcccctgacaccacaggtgccctggagcccttgtgtgactcagcctctgttagctgggtgggtgtcatcagcccctgcctcccaggccagaacctgagaacgggcccagggtgctgtggagatcaacttcaaaagagctaaccccttcccacactccacccacccacctacatttcctctgtgaaatctacctcagagttgtaccctcagaaggacgggtaagcaggaggccagggggtccccagggctgaggtggggagccttctacggcgaaagcctgccaccccacaatgaatccaccctgctccactgcgcgcctctcccaggtctcagctctgggtggggagcagtggccgctaccgacagcgcatgtcccgctcttatccaactcttccaggccccacctccctgcacccctcccctctatagagcaggggagtgaaggggtatgtcaggcggggaaggggccaaggacacgtcattgtaccctgagcgtccccagggagtggaaatggggaagggggcctggagaggggaggcaggggcccctgtgctctctgaacaagttgaaagtccaaataaaacttacctgttc

SEQ ID NO: 1778 - protein, 639 aa, Homo sapiens
TDGPVHGCSCSPRRPRVGRGPALTMESMFEDDISILTQEALGPSEVWLDSPGDPSLGGDMCSASHFALITAYGDIKERLGGLERENATLRRRLKVYEIKYPLISDFGEEHGFSLYEIKDGSLLEVEKVSLQQRLNQFQHELQKNKEQEEQLGEMIQAYEKLCVEKSDLETELREMRALVETHLRQICGLEQQLRQQQGLQDAAFSNLSPPPAPAPPCTDLDLHYLALRGGSGLSHAGWPGSTPSVSDLERRRLEEALEAAQGEARGAQLREEQLQAECERLQGELKQLQETRAQDLASNQSERDMAWVKRVGDDQVNLALAYTELTEELGRLRELSSLQGRILRTLLQEQARSGGQRHSPLSQRHSPAPQCPSPSPPARAAPPCPPCQSPVPQRRSPVPPCPSPQQRRSPASPSCPSPVPQRRSPVPPSCQSPSPQRRSPVPPSCPAPQPRPPPPPPPGERTLAERAYAKPPSHHVKAGFQGRRSYSELAEGAAYAGASPPWLQAEAATLPKPRAYGSELYGPGRPLSPRRAFEGIRLRFEKQPSEEDEWAVPTSPPSPEVGTIRCASFCAGFPIPESPAATAYAHAEHAQSWPSINLLMETVGSDIRSCPLCQLGFPVGYPDDALIKHIDSHLENSKI

SEQ ID NO: 1779 - DNA, 5545 bp, Mus musculus
tttttttcttcacctcctcccttttcaaggcctccaagctaattatttctgttgctttggagtgagcaattctgtggttctctccaccaccacccccaattctgacccgatcccgcctgggggtttctacggtctccgctcgctctgcgtgcacctggcgcgcctctttttttcacccccaacctgttgcaagtctttaatcctcgcaattgggacttgcgtgcaggcatctgaatcctccttgcctcatattttgcaagtgtttgggggagagcacctgctctacctgcaagagatttaaaaggaaaaaaatctccaggctccctctttctccacacactctcgctctcctgccccgccccgaggtaaagccagactccgagaaaatggtgatcagcgtggtcctcctgctgctggccgcctatgccgtaccggctcaaggcctgggttctttcgtgcactgtgaaccctgcgacgagaaagctctgtccatgtgtccccccagccctctgggctgtgagctggtcaaagagcccggctgtggctgctgcatgacttgcgccctggcggagggacagtcgtgtggcgtctacacggagcgctgcgcccagggtttgcgctgcctcccccggcaggatgaggagaagccgctgcacgccctgctgcacggccgcggggtttgcctcaacgaaaagagctacggcgagcaaaccaagatagagagagactctcgggaacacgaggaacccaccacctccgagatggctgaagagacctactcccccaaggtcttccggcccaagcacactcgcatttccgagctgaaggctgaggctgtgaagaaggaccgcagaaagaagctgacccagtccaagtttgtggggggtgcagagaacactgcccaccccagagtcatccctgcacctgagatgagacaggaatccgaacaaggcccctgccgcagacacatggaagcttccctccaggagttcaaagccagcccacgcatggtgccccgtgctgtgtacctgcccaactgtgaccgcaaaggattctacaagagaaagcagtgtaagccctcccgtggccgcaaacgtggcatctgctggtgtgtggacaagtacggaatgaagctgccgggcatggagtacgtggatggggactttcagtgccacgccttcgacagcagtaacgttgagtgacgcgtcccctcccttcctccccctatcctacccccccagccccaactccagccagcgcctccctccaccccaggacgtcactcatttcatctcatttaggggaaatatatatacatatatatttgaggaaactgaggacctcggaatctctagcaagggctaaggagacactccccaccatgaccccggaaatgtattcctttttgaagcaagttgaacggacagagaagggaaggagagaagaagcaagagggagcgagagatggaaagaaagcaaagcgttggaatagaggaaaagagggaaggacagataggattagagagagaagagagaaacagcaaggcagaaaggactccacaaccaaggctgaatctgcccttttgctttcagctctagcctggggtcagaaaaagtgtggcattcagtgacacccagtttagattggtcaaggggagaaaagaaacaaggtgtgtcagtgcctctcgggtctgtcccctcctgcagccagcagtgtggatggctagacccctcaccctcctctcctcttacccaagtgcagggtgatttcatccccaaatttacaaagactaaaatgcattccatccctctgaaaataaacaaaagtgagtgattgaagataggttttcccccagcagacaagtgaactcagaatgtgtgcaaattttactcttgttaaagatttttttaagaagtcagtacgcacccccaacactggaaagacttgattctccagggtgacaagcaattcagaagcgcgtggcttcggcccttgatttcactagactcaaagctggcccggcagcctctgtggaggaggatgagaggtggagaaaaccaaggggcttgtactcacccacaagactccatgtagactttataggcatataaatctattttctttacctttttttccctttccctttctttcgaagttttgcattacctctttaaagtagttttttttaggacactgaagatcttcctcattctgggaaaaatccatatttcacaaatacaacccagaacgccagcttggcctgcgtccaggcagcctttctcgtgagctacaagtgtggctcttttgtggggcaccgatttggatcttctcatgattccaaacgtgtgttgaagtgaatccaccaagccaggtaactgccagcacccaagggtgcatcaagtgcatagcccaggtcaccccatttcagccttccaacccgcagaaagtaactgtctcacaccacaccacataaacctgccagatccatctgtaacccactggcctgcccagacctttttttcccatctgcatttttttttttgaactgcattttgaaagcctccctcagatgccaggctgacagatcagagagaaactaacatgagagatgacagaggaggaggaagtggagggtgggggcagagacttccacagagagacatagaagatggagcagaggtctgggggtggggaggacaagaaagagacagagagaggaaaataccaatagaattttccttggtgtctcccatctaatcaactctctgagatttgagaggaaaaagaaggcaggggaagaacttgaggtagaaatgaggtcagttcaagtcacagggcccagatggtgggtaactgaggcaggatccagacttgagacacacggttggaaacaaggctggttagcctgactgggtattgaagggtgaagaggatgccttggaaagacagcacaacttcagttcaacttcaggcccccaaggaggaactgaggccaaagaatccttcaagtgcttcatgagtctcctctgcccgactcaaacatccttccctgtgatggaggatggtagaaagcccaggacaactcaggcccggatcttcacgactgttgtcatttgccagcctgattttgatccaagagaagcatctcattgcccactggcttcttcaacaaagaggtgcttaacaaaaggctcaggactgtctttgaagactgaagataaccttccaggagaggagactcggacattggtacaggaggccccttttggcgggggacacagctctttgcgctctcttgatggcatggcatagtagaggccccctccaacccggaacatggagcaacacaaagggagagcaaagaaactgacgtgcgtcgactcataggacatgggtggctgcgggcacagaaagggatgcctcctgttgcctggacaggacagttggctgggaaggaaagagaaaattgatcttcataagacaaagggcctgatgggatggcaatagaaggacttaccagacctgcagggtcagtatacccatcaccccgcacaacatccccaacccccaactcaaacttcaatatatcttaggccagtatcctagacctaagtctctcctttctgccattatttctccgcatcttgagcagtcatctgactgagatttgccaagtggatactggggtaccactgccccccaagaaaagactgagccaggaactgcctactcgctccccctcccgagcctggagctaactcctgtgaggggtgctctcttcaccccacaacttactagaccttgagtgagcctctgtcccttatgtgggctcttcgctgtgagccacagatggaggtcattgtatagacagttagccttccccaggtcagcctacctcccccaaacttgtgagtctccccgctgctcatatggagaggcatgtctaagacagcaagtcttctagaggaagcttgcctttaacagacagatggaactaaaccttccaaatgggagatctggctgaacccaggatacagagaccatggacatggatggggtcatcaagagaagagggatgtccttctccaggttagggagagagaaggcaagtttgcaacgatcccatcatgccctgagcaagaagcttttggcccaggctagcctttaactccattagaggcctctctgttgggtttatccacagcagtaggcccaagtatggcctgtccccacctctactatcccgtggaaggtttcttcccacccctttttgacaaatgcctcactcgagcagtggaaagatagctctcttccccctctactgccaggtaacaaagagacctaaccaggacctattctccaccccagccagtcttgaccagccagaacaaagcagggaacctggagaataaaagactctacgttcctctgacaaagactctacgtttctctgacggccaggcctaaacagacaaggcttgggaacatctgccccacaggatacggaggaggtcagctgtgctcactcctcttctccttccaagaccctcttccgaccatgacttatctccatggtaacatcctcaccatcattctcccactaccaagggttgccatggcaacctcccaaccacctgcccatcccaggcagggcagctgtccttctgctcagaaccctagaggactctaggtgaaattttacagcttaagagaggagtgagccaaggagaagagaccctgtagtcctctggctttcaagagaaagaaggctatgatttaaaacacagtagaagggaaagaggtctcgtcgacctctcccggggagcttaggggttgtactgtctttattttttaaaccactaaagtgcaatgtttcctgcactcttgttaccccgcctctcttccctgttaggttttcatttccttgagcagactttcttggttttttaatggagtatagactttcaccacttcacagactctggcctcctctccaagtctctctggatggggaaaaggaaggtagagggtcagaggggaaggggtccctcgtcaccccgcatccattcacccccacttctctggtccctagtcaccggcttcagcccccatctccgacaccatcactgtcacacagtagcctgtcacacggatagtacagttcagacaagactccttcagattccgagacgcctaccggttgtttttggtttttgttttgttttcttttgtttgtttgtttgttttttacaacagcaataaccacatcacatattactgtagctctctatagtgttacgttcagacaccgtagctctgtcctctcttattttgttggttttgacttaaaaaaaaatacttatgctttttactggtgaaacagattgaaaaaaaaattgaacaacaaaccagtttgtgaaaaaaaaaaaatgggaaaaaaaatcaccccgatgtggaagagctcggctcctctttagcattttgtacttaaggaaataaaaaagaaaaacctggaagatctcacattttattacaaagtgaaga

SEQ ID NO: 1780 - protein, 271 aa, Mus musculus
MVISVVLLLLAAYAVPAQGLGSFVHCEPCDEKALSMCPPSPLGCELVKEPGCGCCMTCALAEGQSCGVYTERCAQGLRCLPRQDEEKPLHALLHGRGVCLNEKSYGEQTKIERDSREHEEPTTSEMAEETYSPKVFRPKHTRISELKAEAVKKDRRKKLTQSKFVGGAENTAHPRVIPAPEMRQESEQGPCRRHMEASLQEFKASPRMVPRAVYLPNCDRKGFYKRKQCKPSRGRKRGICWCVDKYGMKLPGMEYVDGDFQCHAFDSSNVE

SEQ ID NO: 1781 - DNA, 4281 bp, Mus musculus
attttgcaagtgtttgggggagagcacctgctctacctgcaagagatttaaaaggaaaaaaatctccaggctccctctttctccacacactctcgctctcctgccccgccccgaggtaaagccagactccgagaaaatggtgatcagcgtggtcctcctgctgctggccgcctatgccgtaccggctcaaggcctgggttctttcgtgcactgtgaaccctgcgacgagaaagctctgtccatgtgtccccccagccctctgggctgtgagctggtcaaagagcccggctgtggctgctgcatgacttgcgccctggcggagggacagtcgtgtggcgtctacacggagcgctgcgcccagggtttgcgctgcctcccccggcaggatgaggagaagccgctgcacgccctgctgcacggccgcggggtttgcctcaacgaaaagagctacggcgagcaaaccaagatagagagagactctcgggaacacgaggaacccaccacctccgagatggctgaagagacctactcccccaaggtcttccggcccaagcacactcgcatttccgagctgaaggctgaggctgtgaagaaggaccgcagaaagaagctgacccagtccaagtttgtggggggtgcagagaacactgcccaccccagagtcatccctgcacctgagatgagacaggaatccgaacaaggcccctgccgcagacacatggaagcttccctccaggagttcaaagccagcccacgcatggtgccccgtgctgtgtacctgcccaactgtgaccgcaaaggattctacaagagaaagcagtgtaagccctcccgtggccgcaaacgtggcatctgctggtgtgtggacaagtacggaatgaagctgccgggcatggagtacgtggatggggactttcagtgccacgccttcgacagcagtaacgttgagtgacgcgtcccctcccttcctccccctatcctacccccccagccccggaaatgtattcctttttgaagcaagttgaacggacagagaagggaaggagagaagaagcaagagggagcgagagatggaaagaaagcaaagcgttggaatagaggaaaagagggaaggacagataggattagagagagaagagagaaacagcaaggcagaaaggactccacaaccaaggctgaatctgcccttttgctttcagctctagcctggggtcagaaaaagtgtggcattcagtgacacccagtttagattggtcaaggggagaaaagaaacaaggtgtgtcagtgcctctcgggtctgtcccctcctgcagccagcagtgtggatggctagacccctcaccctcctctcctcttacccaagtgcagggtgatttcatccccaaatttacaaagactaaaatgcattccatccctctgaaaataaacaaaagtgagtgattgaagataggttttcccccagcagacaagtgaactcagaatgtgtgcaaattttactcttgttaaagatttttttaagaagtcagtacgcacccccaacactggaaagacttgattctccagggtgacaagcaattcagaagcgcgtggcttcggcccttgatttcactagactcaaagctggcccggcagcctctgtggaggaggatgagaggtggagaaaaccaaggggcttgtactcacccacaagactccatgtagactttataggcatataaatctattttctttacctttttttccctttccctttctttcgaagttttgcattacctctttaaagtagttttttttaggacactgaagatcttcctcattctgggaaaaatccatatttcacaaatacaacccagaacgccagcttggcctgcgtccaggcagcctttctcgtgagctacaagtgtggctcttttgtggggcaccgatttggatcttctcatgattccaaacgtgtgttgaagtgaatccaccaagccaggtaactgccagcacccaagggtgcatcaagtgcatagcccaggtcaccccatttcagccttccaacccgcagaaagtaactgtctcacaccacaccacataaacctgccagatccatctgtaacccactggcctgcccagacctttttttcccatctgcatttttttttttgaactgcattttgaaagcctccctcagatgccaggctgacagatcagagagaaactaacatgagagatgacagaggaggaggaagtggagggtgggggcagagacttccacagagagacatagaagatggagcagaggtctgggggtggggaggacaagaaagagacagagagaggaaaataccaatagaattttccttggtgtctcccatctaatcaactctctgagatttgagaggaaaaagaaggcaggggaagaacttgaggtagaaatgaggtcagttcaagtcacagggcccagatggtgggtaactgaggcaggatccagacttgagacacacggttggaaacaaggctggttagcctgactgggtattgaagggtgaagaggatgccttggaaagacagcacaacttcagttcaacttcaggcccccaaggaggaactgaggccaaagaatccttcaagtgcttcatgagtctcctctgcccgactcaaacatccttccctgtgatggaggatggtagaaagcccaggacaactcaggcccggatcttcacgactgttgtcatttgccagcctgattttgatccaagagaagcatctcattgcccactggcttcttcaacaaagaggtgcttaacaaaaggctcaggactgtctttgaagactgaagataaccttccaggagaggagactcggacattggtacaggaggccccttttggcgggggacacagctctttgcgctctcttgatggcatggcatagtagaggccccctccaacccggaacatggagcaacacaaagggagagcaaagaaactgacgtgcgtcgactcataggacatgggtggctgcgggcacagaaagggatgcctcctgttgcctggacaggacagttggctgggaaggaaagagaaaattgatcttcataagacaaagggcctgatgggatggcaatagaaggacttaccagacctgcaggccagtcttgaccagccagaacaaagcagggaacctggagaataaaagactctacgttcctctgacaaagactctacgtttctctgacggccaggcctaaacagacaaggcttgggaacatctgccccacaggatacggaggaggtcagctgtgctcactcctcttctccttccaagaccctcttccgaccatgacttatctccatggtaacatcctcaccatcattctcccactaccaagggttgccatggcaacctcccaaccacctgcccatcccaggcagggcagctgtccttctgctcagaaccctagaggactctaggtgaaattttacagcttaagagaggagtgagccaaggagaagagaccctgtagtcctctggctttcaagagaaagaaggctatgatttaaaacacagtagaagggaaagaggtctcgtcgacctctcccggggagcttaggggttgtactgtctttattttttaaaccactaaagtgcaatgtttcctgcactcttgttaccccgcctctcttccctgttaggttttcatttccttgagcagactttcttggttttttaatggagtatagactttcaccacttcacagactctggcctcctctccaagtctctctggatggggaaaaggaaggtagagggtcagaggggaaggggtccctcgtcaccccgcatccattcacccccacttctctggtccctagtcaccggcttcagcccccatctccgacaccatcactgtcacacagtagcctgtcacacggatagtacagttcagacaagactccttcagattccgagacgcctaccggttgtttttggtttttgttttgttttcttttgtttgtttgtttgttttttacaacagcaataaccacatcacatattactgtagctctctatagtgttacgttcagacaccgtagctctgtcctctcttattttgttggttttgacttaaaaaaaaatacttatgctttttactggtgaaacagattgaaaaaaaaattgaacaacaaaccagtttgtgaaaaaaaaaaaatgggaaaaaaaatcaccccgatgtggaagagctcggctcctctttagcattttgtacttaaggaaataaaaaagaaaaacctg

SEQ ID NO: 1782 - protein, 271 aa, Mus musculus; identical to SEQ ID NO: 1780

SEQ ID NO: 1783 - DNA, 2150 bp, Mus musculus
agtgcagtggttgcacgggagtgcgggctgcacgcgtcaccgtcaccgccgcctgtcccccaccgccgcgcagcgccgatctccctcccggtttcggccgccacctggggatccaagcgaggacgggctgtccttgttggaaggaaccatgaattggcattttcctttcttcatcttgaccacagtgactttatactctgtgcactcccagttcaactctctgtcactggaggaactaggctccaacacagggatccaggtcttcaatcagatcatcaagtcacggcctcatgagaacgttgttgtctccccacatgggatcgcgtccatcttgggcatgctgcagctcggggctgacggcaagacaaagaagcagctctccacggtgatgcgatataatgtaaacggagttggtaaagtgctgaagaagatcaacaaggctattgtctccaagaaaaataaagacattgtgaccgtggccaatgctgtgtttctcaggaatggctttaaaatggaagtgccttttgcagtaaggaacaaagatgtgtttcagtgtgaagtgcagaatgtgaacttccaggacccagcctctgcctctgagtccatcaatttttgggtcaaaaatgagaccaggggcatgattgataatctgctttccccaaatctgatcgatggtgcccttaccaggctggtcctcgttaatgcagtgtatttcaagggtttgtggaagtctcggtttcaaccagagagcacaaagaaacggacattcgtggcaggtgatgggaaatcctaccaagtacccatgttggctcagctctctgtgttccgctcagggtctaccaggaccccgaatggcttatggtacaacttcattgagctgccctaccatggtgagagcatcagcatgctgatcgccctgccaacagagagctccaccccactgtctgccatcatccctcacatcactaccaagaccattgatagctggatgaacaccatggtacccaagaggatgcagctggtcctacccaagttcacagctgtggcacaaacagatctgaaggagccactgaaagcccttggcattactgagatgtttgagccatcaaaggcaaattttacaaaaataacaaggtcagagagccttcatgtctctcacatcttgcaaaaagcaaaaattgaagtcagtgaagatggaaccaaagcttcggcagcaacaactgcaatcctaattgcaaggtcatcacctccctggtttatagtagacaggcctttcctgttttccatccgacacaatcccacaggtgccatcttgttcctgggccaggtgaacaagccctgaaggacagacaaaggaaagccacgcaaagccaagacgacttggctctgaagagagactccctccccacatctttcatagttctgttaaatatttttatatactgctttcttttttgaaactggttcatagcagcagttaagtgacgcaagtgtttctggtcggggctgtgtcagaagaaagggctggatgcctgggatgctggatgcctgggatgctggatgcctgggatgctggatgcctgggatgctggatgcctgggatgctggatgcctgggatgctgtagtgaaggatgagcaggccggtttcacgatgtctagaagatttctttaaactactgatcagttatctaggttaacaaccctctcgagtatttgctgtctgtcaagttcagcatctttgtttcattcctgttgatatgtgtgactttccaggagaggattaatcagtgtggcaggagaggttaaaaaaaaaaaagacattttatagtagtttttatgtttttatggaaaacaatatcatttgcctttttaattctttttcctctcacttccacccaaaggcttgagggtggcaagggatggagctagcaaaagccgtagcctcttcgtgtgttgtttctgttgctgttgctcttgttgttttatatactgcatgtgttcactaaaataaagttggaaaactaacgtctcgctggacaccatttgctgtcaagccgcgtacctgtcactactggtctgtactctttggattggcatttttgtattttgtataaagtaaaaaaaaaaaaaaatttttgaaaagaccatg

SEQ ID NO: 1784 - protein, 397 aa, Mus musculus
MNWHFPFFILTTVTLYSVHSQFNSLSLEELGSNTGIQVFNQIIKSRPHENVVVSPHGIASILGMLQLGADGKTKKQLSTVMRYNVNGVGKVLKKINKAIVSKKNKDIVTVANAVFLRNGFKMEVPFAVRNKDVFQCEVQNVNFQDPASASESINFWVKNETRGMIDNLLSPNLIDGALTRLVLVNAVYFKGLWKSRFQPESTKKRTFVAGDGKSYQVPMLAQLSVFRSGSTRTPNGLWYNFIELPYHGESISMLIALPTESSTPLSAIIPHITTKTIDSWMNTMVPKRMQLVLPKFTAVAQTDLKEPLKALGITEMFEPSKANFTKITRSESLHVSHILQKAKIEVSEDGTKASAATTAILIARSSPPWFIVDRPFLFSIRHNPTGAILFLGQVNKP

SEQ ID NO: 1785 - DNA, 7520 bp, Mus musculus
acatcacatctttcactctgacccctggagctgcgcccacctgcctgctctgcgggcgcccaaccttttctcacttcctgggcaagatgcccggttgaagggacagtgcctggcgaactgggagggagaggggacgagggcggaacctcagccacttctcccctcccttagagtcacaatcaaaagcttgggtgaggacaaacagacctcagtgggtcgagcccttacaaaactcgccccagtgggccagcaaggcgagcgtcactgcggggcctctccaatctgtgtcccgccggggacatggacgcctgagaacccgtgggtccggtaggtcacagaacacagaaaacaccgggactcgggaccgtcatgcactccaagactgctccaaggttcctggtgttcctgctgcttaccctgctgctactcctggctgcctctcctgtggctagcaagggctgtgtctgcaaaggcaaaggacaatgcctctgcgcggggaccaaaggggagaagggggagaaaggggttcctggttcccctggatttcctggccagaaaggatttccaggtcctgaaggcttgcctggaccacagggacccaaggtatgtgggcctgcaagcttgacaaaccctcttgagtcttgctctttttctggcctcccaggccaccctgggcctcgtgggctggctggtttaccaggatgcaacggatctaagggtgagcctgctcaaggagaagacaggggattcaatggaaaaggtgaccctgggcctccaggggttccaggcttccagggttttccgggactcccaggttttccagggcctgccggtccaccaggacctccgggattttttggtttaccaggagcaatgggacccagaggacccaaaggtatgaaaggattaacaggacctcctgggccaccaggaacagtgatttttacactcacccagccatacaacaaatcggacttcaagggagagaaaggagatgagggagagaggggtgaacccggacctcctggaccctcggtagataaacaaggaaattctcttttcggccaaaataaaaagactgaagtaagtggagttggcgagcattccacccatagctctccttcctatttattctttgccttctcctttaagacagaatattatgacgcatacctggaaaagggagagagaggaatgccaggccttcctgggcccaaaggagcccgtggcccacaggaagaaaaattaaaacctacaaatggctctttcttccaaggactgtcaaggcctggcctcagaggacccattggatggccaggcttgaaagggagtaaaggagagagaggaccccctggaaaagacactgtgggccctcctggacccctgggatgtcctggctcaccaggtccaccaggccctccaggacctccaggatgtccaggtgacattgtttttaaatgttcccctggtgagcatggaatgccaggtgacacaggacctccaggagttccaggacttgatggacccaaaggagaaccaggcagtccatgcaccgagtgtcactgcttcccagggccccctggagtcccaggatttccaggattagatggtatcaaaggaatcccaggaggacgaggtgtgcctggtctgaagggaaacccagggtccccaggaagtgcaggtctcccaggatttgcaggattcccaggtgaccaagggcatccaggacttaaaggggacaaaggggatacacctctaccctgggggcaagtgggtaatccaggtgatcctggactcagaggcctgcccgggagaaagggcttcgatggaactcctggaggtccaggagcgaaaggaccaccaggacctcagggcgaaccggccctgagtggaaggaaaggggaccaaggacctccaggacctcctggattccctggacccccaggacctgcaggaccagctggaccaccaggctatggacctcaaggagagccaggtccaaagggagcccaaggagtccccggcgtcctgggaccacctggagaagccggtcttaaaggagaacccagtacatcaactccagatctaggtcccccaggccctccagggccccctggtcaggctggccccagaggtctacctggtttgcctggaccggtgggaaaatgtgatcctggtcttcctggacctgatggtgagccaggaattccagaagctggatgcccagggcctccaggacctaagggaaatcaaggtttcccagggacaaaaggatcacctggttgtcctggggaaatgggaaagcctggccgtcctggagaaccaggcatcccaggagccaagggagaaccatccgtaggcaggcctgggaaaccagggaaaccaggctttccaggagaaagaggcaatgctggggaaaatggagatattggactccctgggcttccaggcctccctggaactccaggaagaggcgggcttgacgggcctccaggagacccaggacagcctggatcacctggagcaaaaggatccccaggaaggtgcataccaggacccaggggcacccaaggacttcccggcttgaatggattgaaagggcaaccaggtcgaagaggtgataccgggccaaagggagaccctggcatcccaggcatggacaggtctggggtccccggagatcctggaccaccaggaacaccaggttgtcctggtgagatgggaccacctggacaaaaaggatatccgggagctccaggattcccaggaccaccaggcgagaaaggagaggttggaatgatgggctatcctggaaccactggccctccggggcttcctgggaaaccaggctcacaggggcagcgaggtagcctcggaatcccaggaatgaaaggggaaaaaggacgcccaggagccaaaggcgaacgaggagagaaaggaaaaccagggccttctcaaacaacactcttaaagggagacaaaggagagcctggacttaaaggatttgttgggaatccaggtgagaaaggaaacagaggcaacccagggttaccaggtccgaaaggcctcgagggattgcctgggctaccaggtcctccaggccctagaggagatacgggaagcagaggaaatcctggaagaccaggaccacacggcatgccaggaagcatggggatcatgggggtgccaggccctaaagggagaaaaggaacttcagggcttccaggtctagctggaagaccaggcctgacagggatccatggtccccaaggagataagggggagccgggttattcagaaggtgcaagaccaggaccaccaggaccaaagggcgatccaggattgccaggtgacaaaggaaagaaaggagaaagaggcgtacctgggccacctggacaatcggggcctgccggacctgatggagcccctgggagtcctgggagtcctggtcacccaggaaaaccaggtcctgctggtgatttgggtctgaaaggacagaaaggcttcccaggccctccaggaagcactggccctccaggccctccaggactcccaggacttcctgggccaatgggtatgagaggtgaccaaggacgtgatggaattcctggtcctccaggagaaaaaggagaaacaggcttgctgggggcctacccaggcccaaaagggagccctggtgtaccaggtgccaaaggagacaggggagttccaggcttgtctggccttcccggcaggaagggggttatgggggatgttggaccccaaggacccccaggcactgctggactcccagggccaccaggtctacctggggcaattatccctggccccaaaggagacagaggtcttcctggcttaagaggaaatccaggtgagccaggtccccctggacctccaggacctatcggaaaaggcataaaaggtgacaaaggatttatgggcccacctggccccaaaggcctgcctggaactgtaggggacatgggcccaccaggtttcccgggagcaccaggtacccccggtcttcccggtgtcagaggtgatccaggattccctggatttccaggcataaaaggagaaaagggtaaccctggatttcttgggccaattggacatccaggaccagttgggcccaaaggaccaccaggtccacgtggaaaacctggcactcttaaggtcatctctcttccgggaagcccagggccacctggtgtacctggacagccaggaatgaaaggagaccctggacccctgggactgccaggaatcccaggaccctgtgggccaagaggtaaaccaggcaaggatgggaaaccaggaactccaggaccagctggtacaaagggcaacaagggcttgaaaggacagcaaggcccacctggtctggatggattgccaggcttaaagggaaatcctggtgacaggggaacgccggccactggtacaagaatgcgaggcttcatcttcacccgacacagtcaaaccacggccattccttcatgccctgaaggaacacagccactctatagtgggttttctcttctttttgtacaaggaaacaaacgtgcacatggacaagacctaggtactctgggcagctgcctgcagcgattcaccacaatgccgttcttattctgtaacatcaataatgtatgtaactttgcatcacgaaatgattattcatactggctgtcaacaccagctctgatgccaatggacatggctccaattagtggcagagctctcgaaccctatattagcagatgcaccgtctgtgaaggtccagcaatggccatagctgttcacagtcaaactactgctatccctccgtgtccccaggactgggtttctctctggaaaggtttttctttcattatgttcacaagtgcaggctctgagggtgctggacaagcacttgcctcgcctggctcctgcctggaagaattccgagccagtccatttatagaatgccatggacgagggacatgtaactactactcaaactcctacagtttctggctggcttcgctgaacccagaaagaatgttcagaaaacctattccatcaactgtgaaagctggagacttagagaaaatcataagccgctgtcaggtgtgcatgaagaaaagacattgacgaaatcaaagaaaccagaaccgttttttttttttttttttttttttttgttccttcttaagtaacaaagtcatgacttagaacatgaatttacttaggtctttctctctaaccttaaagatgtagtagtgcaaagtttcactacacaagaaagcatttcattcgttagtctgtgatgtgggtctctaaacctgtaggtttcaaagttccctgtggaaaggcaacagcttgccacagaatatcgctgaaatcacattccagttgtacccaaagagctgactaaatgttgattgtgtggaacttgaactacaagctaagagaggtctgtcctgtggatgcacggtgtgttccttgtctcccactcctgagcaaaggagtgcggttccttccatctcctccctgacaccttagacttcaactacagaaggagaagggagtataccatcaagcacaccgtgaagagaactggagggtcagagctgctgagtggtgtaagggctagaacacagaataaatgaggccccatgatgtttcaggactcatttaaatatgcacaaggctaggaccaaaggaaacttcctgaagcgaatcataacaggcttgtatataaagtgtagttttgttttctgttttgttgacgatgtctatttgcttattcactgagctctttttactatgtcaatagattcaaagctggtaaaacgtttacccttggggaactaggttttactaggatggcatacacatacattgaaacatttctctttattgttttcacaagtaacaaggacactgcttactaaatgtgcactttatccccactcctatcaacgccgaccttaaataatttcaccaggaaataatcaggtttatccgacgcaaacatttttttctttgctctaaacagtacataacatggatttacagatttgttcctttgttagttttataacttttcctttggaaaacacacacgtacgccatgatttttatgttatagattcttcgcaaccatgtggaaagagaccactgggtaaaaccttactgtactgtacacagctgctatatgtcttaaaacatgttcttaagtatacagatacattccacagttacttaattgagcttaacaagttgttttcttcagttccaaactatttcccatatactggactggaccggcggtgcagggggtagtgagagagacttgcttctgatctaccctcaaaggagataacaaaccccgtgtgtggagactctcacgcaggcaggaagcccatcctctgctgcttcacccccttccctacacggaaaacaaacaaagagtctcagctatggttgctgttttagttttcccttacttctatttcacagttcagcaggcctgagagaagatttaaaaataagagcacttgttgctctgcagaagcccctagtttagttcctagtacccacactggtactgtttcacagtagcctcttccagatgacccaacatccacttctggactctgcacccacgctcagctagatatacaaaagttttaaaacttttaaaataagatctatgtccaggctaagttcaaaacctctaacttctcttaggcatgccagaagctaatgtctgaaaaatattaagaaatcgggaactttttaataatcagatagtgtcgtactatttgaagactcaaagaggccaggcattgtgaggcaaacctttgagtgtatttcttgacccacggaagtggacgtgatggtgctgatacttaagttcaggctggtgctgtaaactcaactgctttgtatttggaaaatgtgacccaagagcacagacaagggttgtcattctttaccattcgtgtgaccactacaagacattttacacctgagctgagacatgcaacatctcattacaagtatgtatttcagctaacatttttgtttgaaaaatatcctgttgtcccacatacattccagtagtgaaaacaaggactaatctccttggccagtgtaggagtagcagctgtggcattcaggagcttgtcctaattgcccattgtagatcattctaaacctgcaaagtttgaaactgtaactagcaaacagaaatctgtgtcttgtcttgatgagaagcatctcattgtacaacccaggatgacccccaaatcaccacaagttttctgcctcagccacccagaattttgttttcaaagttttcatcatcctctcatgttctccactcaataggcacacacccaagaaactggccacaatccttttcacctttgtctctctttaaaactcactggtgactttcagggtaatctatttcactactagactggtgctgatgtcacaacagctacccttcatttgctcataggccc

SEQ ID NO: 1786 - protein, 1588 aa, Mus musculus
MHSKTAPRFLVFLLLTLLLLLAASPVASKGCVCKGKGQCLCAGTKGEKGEKGVPGSPGFPGQKGFPGPEGLPGPQGPKVCGPASLTNPLESCSFSGLPGHPGPRGLAGLPGCNGSKGEPAQGEDRGFNGKGDPGPPGVPGFQGFPGLPGFPGPAGPPGPPGFFGLPGAMGPRGPKGMKGLTGPPGPPGTVIFTLTQPYNKSDFKGEKGDEGERGEPGPPGPSVDKQGNSLFGQNKKTEVSGVGEHSTHSSPSYLFFAFSFKTEYYDAYLEKGERGMPGLPGPKGARGPQEEKLKPTNGSFFQGLSRPGLRGPIGWPGLKGSKGERGPPGKDTVGPPGPLGCPGSPGPPGPPGPPGCPGDIVFKCSPGEHGMPGDTGPPGVPGLDGPKGEPGSPCTECHCFPGPPGVPGFPGLDGIKGIPGGRGVPGLKGNPGSPGSAGLPGFAGFPGDQGHPGLKGDKGDTPLPWGQVGNPGDPGLRGLPGRKGFDGTPGGPGAKGPPGPQGEPALSGRKGDQGPPGPPGFPGPPGPAGPAGPPGYGPQGEPGPKGAQGVPGVLGPPGEAGLKGEPSTSTPDLGPPGPPGPPGQAGPRGLPGLPGPVGKCDPGLPGPDGEPGIPEAGCPGPPGPKGNQGFPGTKGSPGCPGEMGKPGRPGEPGIPGAKGEPSVGRPGKPGKPGFPGERGNAGENGDIGLPGLPGLPGTPGRGGLDGPPGDPGQPGSPGAKGSPGRCIPGPRGTQGLPGLNGLKGQPGRRGDTGPKGDPGIPGMDRSGVPGDPGPPGTPGCPGEMGPPGQKGYPGAPGFPGPPGEKGEVGMMGYPGTTGPPGLPGKPGSQGQRGSLGIPGMKGEKGRPGAKGERGEKGKPGPSQTTLLKGDKGEPGLKGFVGNPGEKGNRGNPGLPGPKGLEGLPGLPGPPGPRGDTGSRGNPGRPGPHGMPGSMGIMGVPGPKGRKGTSGLPGLAGRPGLTGIHGPQGDKGEPGYSEGARPGPPGPKGDPGLPGDKGKKGERGVPGPPGQSGPAGPDGAPGSPGSPGHPGKPGPAGDLGLKGQKGFPGPPGSTGPPGPPGLPGLPGPMGMRGDQGRDGIPGPPGEKGETGLLGAYPGPKGSPGVPGAKGDRGVPGLSGLPGRKGVMGDVGPQGPPGTAGLPGPPGLPGAIIPGPKGDRGLPGLRGNPGEPGPPGPPGPIGKGIKGDKGFMGPPGPKGLPGTVGDMGPPGFPGAPGTPGLPGVRGDPGFPGFPGIKGEKGNPGFLGPIGHPGPVGPKGPPGPRGKPGTLKVISLPGSPGPPGVPGQPGMKGDPGPLGLPGIPGPCGPRGKPGKDGKPGTPGPAGTKGNKGLKGQQGPPGLDGLPGLKGNPGDRGTPATGTRMRGFIFTRHSQTTAIPSCPEGTQPLYSGFSLLFVQGNKRAHGQDLGTLGSCLQRFTTMPFLFCNINNVCNFASRNDYSYWLSTPALMPMDMAPISGRALEPYISRCTVCEGPAMAIAVHSQTTAIPPCPQDWVSLWKGFSFIMFTSAGSEGAGQALASPGSCLEEFRASPFIECHGRGTCNYYSNSYSFWLASLNPERMFRKPIPSTVKAGDLEKIISRCQVCMKKRH

SEQ ID NO: 1787 - DNA, 1420 bp, Mus musculus
acacagctcttagaaagccttggctgaaccagatggacagaaggaggatgcctctctgggcactcttgttgctctggagtccttgcaccttcagtctcccaacacgcaccgctacctttgaacgaatcccgctcaagaaaatgccttctgtccgggaaatcctggaggagcggggagtggacatgaccaggctcagtgctgaatggggcgtattcacaaagaggccttccttgaccaatcttacctcccccgtggtcctcaccaactacctgaatacccagtactacggcgagattggcatcggtaccccaccccagaccttcaaagtcatctttgacacgggttcagccaacctctgggtgccctccaccaagtgcagccgcctctaccttgcttgtgggattcacagcctctatgagtcctctgactcctccagctacatggagaacgggtccgacttcaccatccactacggatcagggagagtcaaaggtttcctcagccaggactcggtgactgtgggtggaatcactgtgacacagacctttggagaggtcaccgagctgcccctgatccctttcatgctggccaagtttgacggtgttctaggcatgggctttcccgctcaggccgttggcggggttacccctgtctttgaccacattctctcccagggggtgctaaaggaggaagtgttctctgtctactacaacaggggttcccacctgctggggggcgaggtggtgctaggaggtagcgacccgcagcattatcaaggcaattttcactatgtgagcatcagcaagactgactcctggcagatcacgatgaagggggtgtctgtggggtcttccaccctgctatgtgaagaaggctgtgcggtagtggtggacactggttcatcctttatctcggctcctacgagctccctgaagttgatcatgcaagccctgggagccaaggagaagagaatagaagaatatgttgtgaactgtagccaggtgcccaccctccccgacatttcctttgacctgggaggcagggcctacacactcagcagtacggactacgtgctacagtatcccaacaggagagacaagctgtgcacactggctctccatgccatggacatcccaccacccactgggcctgtctgggtcctgggtgccaccttcatccgcaagttctatacagagtttgatcggcataacaatcgcattggattcgccttggcccgctaaggccctctgccacccagtaaccctaggccaagccaagctggcagtcctgggggccattttgtctggctttgtccccaacatagggacactggacacagagaccctaacgagtgtttgccccttcacctgcactcacccttccctgctttaaggaaaaatcgaataaagatttcatgttt

SEQ ID NO: 1788 - protein, 402 aa, Mus musculus
MDRRRMPLWALLLLWSPCTFSLPTRTATFERIPLKKMPSVREILEERGVDMTRLSAEWGVFTKRPSLTNLTSPVVLTNYLNTQYYGEIGIGTPPQTFKVIFDTGSANLWVPSTKCSRLYLACGIHSLYESSDSSSYMENGSDFTIHYGSGRVKGFLSQDSVTVGGITVTQTFGEVTELPLIPFMLAKFDGVLGMGFPAQAVGGVTPVFDHILSQGVLKEEVFSVYYNRGSHLLGGEVVLGGSDPQHYQGNFHYVSISKTDSWQITMKGVSVGSSTLLCEEGCAVVVDTGSSFISAPTSSLKLIMQALGAKEKRIEEYVVNCSQVPTLPDISFDLGGRAYTLSSTDYVLQYPNRRDKLCTLALHAMDIPPPTGPVWVLGATFIRKFYTEFDRHNNRIGFALAR

SEQ ID NO: 1789 - DNA, 3108 bp, Mus musculus
ggggctgcgactctgccagcagctggctccggggttgcaccgctgcattgagaatggacagcagggcgcggagctcttcccgagaggcccacgggagaagtagcaggtcctcctctagggatgacaagaaggcaaaggccgggaggggcagcagaggccgcgcacgtccggatgctggagcagagcggcagagcaccgggcggacagcgacccgaggggagccccgagctcccgctgccaccgccaccgtagtggacgtggacgaggttcggggccctggtgaggagggcacggaagtggtggcgctgctggagagcgagcgaccagaggaaggcatcaagccctctggattaggggcctgcgagtggcttcttgtcctcgcctccctgatcttcatcatcatgacgttccctttttccatctggttctgcataaaggttgtgcaagagtatgaaagagtaattatattccgactgggacatctgcttcctggaagagccaaaggtcctggcctgttcttttttttaccctgtctggacacctatcacaaggttgatctccgtctccagaccttggaaatacctttccatgaggtggtaaccaaagatatgtttataatggagatagacgctgtctgctactaccgcatggaaaatgcctctcttcttctaagcagtctagcccatgtgtccaaagccatccagttcctggtgcaaaccaccatgaagcgcctcttggcacatcgatccctcactgaaattctcctggaaaggaagagcattgcccaagatgtaaaggttgccttagatgcagtgacctgtatttggggcatcaaagtggagagaactgaaattaaggatgtgaggctgccagctgggcttcagcactctctggcggtggaagctgaggcacaaagacaggccaaagtgcgggtgattgctgcagaaggggaaaaggctgcttcagagtccctgaggatggcggctgagattctgtcgggcaccccagccgctgtccagcttcgatacttgcacactcttcagtcgctgtccacagagaagccagccactgtggttttgcctttgccatttgacatgctaagccttttgtcctctcccggcaacagagcacaagggagcatcaactacccaagttcctccaaaccagttgaaccactaaatcccaaaaagaaggactctcctatgttataggcgaatgggcaaaggctgtgtgaatctgccatataaagccacatccctgagagaggcatttggtgtccctcacccccaccccgcacttgtttggttgccaaatagaatgccttttgaatgtataaagtcacaagatggctacatgcatgagaacacagtgaaatgacagtggcagagaagacagtcaaccacacaagtaggttgtctcatcatattaattacaggaaagagatttagaattttgaattgacatgtggtccgattatgatttctgaagacttagttcaaataccttccactgcttgtttcctggctccttcagcaaggcctttgcggatcctccagccttttttgcaagtgcctatcagtgcacatggagtggaaagccagggcttaggacacaggcatctcccctttccgtattcgtacaaactcccactgaaacagcccacttagctatgttgctggctgttaacaacttttccagcctaaaattccaaactctcagaaagtagtcccaaggcataaaagccctgtggtcaggcatgttggggcaacaaccccacttcctcagtaccaattctgctctagtttcatttttgtctttatgattaaaatattccagcaacaagaaacttaaaggagaaagagtttattttagggcacaattccaggtgacagtccatcactgtggagaagttaaggcaagaacttgaagcaactcttacttagtcacttcatgcaggcaagaacatgaagcagctggtcatgtcacagtcaaatgcagaaagcaatgaatacgtggttcttagttgtctgagttcagctcagtttacccactcatccagttcagggctcccctgcctagggagtgctgtcacctatcatgggctggatcttcgcacattaattaatttaaaaacagtctctctgcagacatgcccacaggataacctaatgtagataatccctcattagtctcttctggggttattctaggttgtatcaagttggcaaacaaaactaaccttcacatctacatagcaataccctgtctcaaagccaacaacaaaaatggagtcacttgtgtcagtgttccaaaaagtaattaaagcctagaccagtacttctcaagcttcctgatgctgtgacattttaacacagattctcacgttgtgatgaccccaaccataaggttattttcactgctacttaataactgtcattttgcagaatttttcataccaagtcctaattgcttgctgtcatgtacactatactacaatgtatacaagtatgtgctagagaactctcttactggtaagaagttatgctgataatcaaccagggatatgtgtctgggtcatattccttatgggatacagatctcttgggtagaagagttactaccaacagtagggaatgatagggcacagaaaggacagatatgggcactgtcatactctgtaatacaaggacacatttgtactcaacattgttgaaaggactcttcactggtagcttagcatacactgctaatggtttgttctaagttaatcaccttccatagcttaggtgctcctggatgagaacacttttgataccaacagaaactagagtttccataagtatatgggcccaaacatctacacaaagaggggaaaatacaaagaatgataggaagacagacatcatcacatgtctcaaaaaaatgtggctgatctcttgaccagaggggcaagactgagtctggcatgactgactggctgcctctggccctaacatctccacctctccctatatcatctgttggagattgtgatgatgatggtctgagatgctaatctgctgcatctctggttgcttgctcactgaataaaatatagttttatgattc

SEQ ID NO: 1790 - protein, 385 aa, Mus musculus
MDSRARSSSREAHGRSSRSSSRDDKKAKAGRGSRGRARPDAGAERQSTGRTATRGEPRAPAATATVVDVDEVRGPGEEGTEVVALLESERPEEGIKPSGLGACEWLLVLASLIFIIMTFPFSIWFCIKVVQEYERVIIFRLGHLLPGRAKGPGLFFFLPCLDTYHKVDLRLQTLEIPFHEVVTKDMFIMEIDAVCYYRMENASLLLSSLAHVSKAIQFLVQTTMKRLLAHRSLTEILLERKSIAQDVKVALDAVTCIWGIKVERTEIKDVRLPAGLQHSLAVEAEAQRQAKVRVIAAEGEKAASESLRMAAEILSGTPAAVQLRYLHTLQSLSTEKPATVVLPLPFDMLSLLSSPGNRAQGSINYPSSSKPVEPLNPKKKDSPML

SEQ ID NO: 1791 - DNA, 4556 bp, Mus musculus
agccctggactctcgctcacagtgggcagcgggcagccgccagcgccaagaatcttcttctcccgcttctccgcttcccgatccttctccgggaggccactcgttggctccgcggactcgtgttccagcgacccttggccacttagtcctgtcccgccgggctacttggaaggcacttccccggagctcatcgttgcccaccgtgcacagtgcccggttaaacccagcgagtgagctcggactgtagcatcagcgctagcgctcggcaactttgaagaaaagagcggcagtccccgcagcggaccacaacagctaccatgactccctggcttgggcttgtcgtgctcctgagctgctggagccttgggcactggggcgcggaagcgtgcacatgctctcccagccatccccaggatgccttctgcaactccgacatcgtgatccgggccaaagtggtgggaaagaagctggtgaaggaggggccctttggcactctggtctacactattaagcagatgaagatgtaccgaggcttcagtaagatgccccacgtgcagtacattcacacggaagcctctgaaagtctttgtggcctcaagctagaagtcaacaaataccagtacctgctgacagggcgcgtgtatgaaggcaagatgtacacaggactgtgcaactttgtggagaggtgggaccacctcacactgtcccagcgcaagggcctcaattaccgctaccacctgggttgcaattgcaagatcaagtcctgctactacttgccttgttttgtgacctccaagaatgagtgtctctggaccgacatgctctccaattttgggtaccctggctatcagtccaaacactacgcctgcatccggcagaagggtggctactgcagctggtaccgaggatgggctcccccagacaagagcatcagcaacgccacagacccctgaacccagaccttccccacctcacctccttcccatcccgccgagcgtcccagacactaactcttcccagatgatgacaatgaaattagtgcctgttttcttgcaaatttagcactggggacacttaaagtctctgctgtctatggagttgatttggaaataccttcctggccccgcccctaccccttctttttggttttgacatcacccatttccaactggggatctctggtgccaagccagaaagaacgaggcatgtatacacctcttcttcatgatatataatctatatttttttaggaaaacagaaattgaaaaatttatcccattggggcatttaaagctactcttctttcttcttcctctcttgaccacatcctagacccagttccatatacacttcttcatcccaatacacaggaaacatggataaggaagttggcagaagtccaactgtttcccaatcagtcaaaggcagcaagcagacagacgccaggtatttgaaaggtcttctacacagaggatatacaactgtatgtctgggtcagacagtctgtctatgtgtgcatgtcagagggagagaagagacagactgtaggagtgggtctcacagttatccagccctgtgatacttgggttgaccccatgtttcagatcctggaacaagcatccaagagtaacagaactttctgagctggcaaaggcttaaacatctgcctgggttcagcaggcaacctgcccgtctgtacaaaaaactcaaagggctgagatgaacgtctttcctctcctgcctcccatgagacagtctcctaggaattcttggggaagtttggctggaagcttgccaactgtaagttggagaaacacacacctgacactatccacagatatagtcaagtagatttggatagagaatactatttccaaagtagtgtttagctcatctagggggatgtgtttatatatacatttgcatatacccacgggggattatgagctaattttttttataggacacagaattctattcaatgctgttaaatatgcaaatagtttaatctttttttcttttgttgtttgatgggaaattgtgacattccaagttgacttttttttattatctgaattaaaatttgaaactctgaccacactcagtaccctactgtccctataactggggttatctgaccatccatctcccttctttgttctgctttctgttcggggtgcccttcacttaattgccttactggctggctgacggcaggggagtgtgagtgttaggttagggccttctcatgaaaggggcagttgcacagtggaatgactcctctcctggatctggggacagcatacacttcttccccagctcagtaatgggtgaagtcacttccggaggtggtcacctcatagaatgaacatgattggttactgagggagccaggctctgccgtccaaatgtaggccttttgttgtgttgtatttttgtttttaaataaaagtacagtataaattttcctattaaataagattattttaagttttagtgtcaacattgcaatgccaatagtaggtgagagtgtattgcacagagttggagatagtaaggtggtgacatttaacacagttactctgtcttttttcagattatgggtatttatcctctattagtatcatatcgttttcattccactttagaaacacagttaccagttgagagagagagagagagagagagagagagagagagagagagagagagagaacaagttctagtctgtccccaccccacacataccactgctttgtccaggtgtttgatagaagagcagggcaggaagacagttcaggagatgggtgtcaagttttctcttggttgatttcattcccttgcatctttcccctgtgctgacagggggcagaaggcacaaccatttccatggtgtgccgagagaaggagctgaggtcagcaagccagtggttcttaagagctgaacctctggctttactgttggaagttgtctatttcaacctcagagtttcctaatatggcgctcctgatctatcttactcaagtgccctcccatatgtataccccaacatcttttccatcttaatccagcatcgggccattctcaatccctggtaatcacctcccttttacatggacagacttgaggtgaggcctaagtatgaggcacctgaagataaaaccaatgggcagaaccaatggccccagtcggcttttgaggtcttggtgagaagtactggccacgaaagggtcttgtgtaaagttacatcatcggagagcggtttttgagctttcaataagctatagctttgtttatttcacctgttcacttactgtataatttaaaatcatttatgtagctgagacactttgatacttcaattatatcgtgaatgttttattttgctaaatcatgtgccatgtgtaggctgttgtgtgtacactgtgtctaagagaagaagaaaagaaaaaaaaaagaaagaaacccacatgccattttttttttctgattcaaattctacagtagaatggagggcagaattactgggacacaatcaccactcagctagaatggagattcaaggaaatggaaggtactagaaacagactcctccagcctcctccccatagaatcctaagggtgggaagaagaagaagaaaaaaagcaaaagcaaaacaaaacagaaatcaaaagtacactcaagttcttgtcctgtatcaaatatccctaggtcatctgccacccactttccaagacctttctcctactcaaccaggaagtcatggtttctgcagtccagagccatggcaactgagattctaagctctctttgtctcatccaggcaacttttctgtctcccaaccaaggaattcctctgctcaggctcctgttgcccaggatagctctcttctatagccaggatgtggagcttaaggagactccaatgtttactttctccagtcctagctctgccatataaacactgtctcatgttgtgcttcttaaacgacaaagaacatagtgacttttggggatagatctgtctgggagataatgtgagtccaggaggcattactcttccctgcctcacatcaaggtgccattcaggtagttggctcccagctacttaacgataaaaatatcactttcgtatttgtatcagagaaacttaaaaaaaaaataaagtctgatggtagaaatccaatgaaatgggagaaggcaggagagagaggtctcagtagatctaagtcggctgtttgggttgaggaggagagaacccgaggaaatgaccatgctctggggacaggggtaccttagattctctgtctatttttcctctagcaagccagctgtgctgaagcccagtagagatgaagagacaccagccagagaaaaccccctctagaaggaatgtatttgttgctaaattttgtagcactgtttacagttttcctccatgttatttatgaattttatattccgtgaatgtatattgtcttgtaatgttgcatagtgttcactttttatagctgtcctttattctaaacagtaaagtggttttatttctatcac

SEQ ID NO: 1792 - protein, 211 aa, Mus musculus
MTPWLGLVVLLSCWSLGHWGAEACTCSPSHPQDAFCNSDIVIRAKVVGKKLVKEGPFGTLVYTIKQMKMYRGFSKMPHVQYIHTEASESLCGLKLEVNKYQYLLTGRVYEGKMYTGLCNFVERWDHLTLSQRKGLNYRYHLGCNCKIKSCYYLPCFVTSKNECLWTDMLSNFGYPGYQSKHYACIRQKGGYCSWYRGWAPPDKSISNATDP

SEQ ID NO: 1793 - DNA, 2080 bp, Mus musculus
cattcctgcagcccttcagaccgccagaactcttctgccgcctgcctgcctgcctgcctgcctgcctgcctgtgagttcccagcatcatgagggcctggatcttctttctcctttgcctggccgggagggccctggcagcccctcagcagactgaagttgctgaggagatagtggaggaggaaaccgtggtggaggagacaggggtacctgtgggtgccaacccagtccaggtggaaatgggagaatttgaggacggtgcagaggaaacggtcgaggaggtggtggctgacaacccctgccagaaccatcattgcaaacatggcaaggtgtgtgagctggacgagagcaacacccccatgtgtgtgtgccaggaccccaccagctgccctgctcccattggcgagtttgagaaggtatgcagcaatgacaacaagaccttcgactcttcctgccacttctttgccaccaagtgcaccctggagggcaccaagaagggccacaagctccacctggactacatcggaccatgcaaatacatcgccccctgcctggattccgagctgactgaattccctctgcgcatgcgtgactggctcaaaaatgtcctggtcaccttgtacgagagagatgagggcaacaacctcctcactgagaagcagaagctgcgtgtgaagaagatccatgagaatgagaagcgcctggaggctggagaccaccccgtggagctgttggcccgagactttgagaagaactacaatatgtacatcttccctgtccactggcagtttggccagctggatcagcaccctattgatgggtacctgtcccacactgagctggccccactgcgcgctcccctcatccccatggaacattgcaccacacgtttctttgagacctgtgacctagacaacgacaagtacattgccctggaggaatgggccggctgctttggcatcaaggagcaggacatcaacaaggatctggtgatctaagttcacgcctcctgctgcagtcctgaactctctccctctgatgtgtcccccctcccattacccccttgtttaaaatgtttggatggttggctgttccgcctggggataaggtgctaacatagatttaactgaatacattaacggtgctaaaaaaaaaaaaaaaacaaagtaagaaagaaactagaacccaagtcacagcattttcccacataactctgaggccatggcccatccacagcctcctggtcccctgcactacccagtgtctcactggctgtgttggaaacggagttgcataagctcaccgtccacaagcacgaggagatatctctagctttcatttctgttttgcatttgactcttaacactcacccagactctgtgcttatttcattttgggggatgtgggctttttcccctggtggtttggagttaggcagagggaagttacagacacaggtacaaaatttgggtaaagatgctgtgagacctgaggacccaccagtcagaacccacatggcaagtcttagtagcctaggtcaaggaaagacagaataatccagagctgtggcacacatgacagactcccagcagcccgggaccttgctgtcttctcgactcttagggcgtttctttccatgtttggctgttggttttagttttggtgagccatgggtgggccagaacatcactcaactgcaattgggctttcaggttcttgccgggagctctaggcactgggaggctgtttcaggaaagtgagactcaagaggaagacagaaaaggttgtaacgtagaggaagtgagactggtgaattggtttgatttttttcacatctagatggctgtcataaagtttctagcatgttccccctcacctctccccaccccctgccacttgaaaccttctactaatcaagagaaacttccaagccaacggaatggtcagatctcacaggctgagaaattgttcccctccaagcatttcatgaaaaagctgcttctcattaaccatgcaaactctcacagcaatgtgaagagcttgacaagtctttcaaaataaaaagtaacaacttagaaacgg

SEQ ID NO: 1794 - protein, 302 aa, Mus musculus
MRAWIFFLLCLAGRALAAPQQTEVAEEIVEEETVVEETGVPVGANPVQVEMGEFEDGAEETVEEVVADNPCQNHHCKHGKVCELDESNTPMCVCQDPTSCPAPIGEFEKVCSNDNKTFDSSCHFFATKCTLEGTKKGHKLHLDYIGPCKYIAPCLDSELTEFPLRMRDWLKNVLVTLYERDEGNNLLTEKQKLRVKKIHENEKRLEAGDHPVELLARDFEKNYNMYIFPVHWQFGQLDQHPIDGYLSHTELAPLRAPLIPMEHCTTRFFETCDLDNDKYIALEEWAGCFGIKEQDINKDLVI

SEQ ID NO: 1795 - DNA, 2195 bp, Mus musculus
tcctgcgcagttctccgccgcagcctcagcgggcaagcgccggggctgctctcaatctcctggctgcgaggaggcagccccggcgagctgtcgtgcgccccgtccagagttactgagtgcggggcacagcgtaactgacagcgcgtctgctcacagttcccgtcgcctggacttagctttccaaccccggcttctcgtgggcatcatgtcaagagccgtcgccgctgcaaccgccgccgccacccggggaagagccgcagcctcggcagccgcgcgcgcaggagggcaataaaccgaatcactccgggctcaaagtggcaggggaccgtcgcggtgctctctgttccggcgggactcctgccatgtgctgagccatgcccctggccgcgcccgcgggccgcgtatggggcagcgcctgagcggcggccggtcctgtctcgatgtcccgggccggttcctgccgcagccgccgccgcccccgccgccggtgaggaggaagctcgcgctgctcttcgccatgctttgcatctggctgtacatgtttttgtactcgtgcgccggctcctgtaccgccgctcccggcctgctgctcctgggctcggggtcccgcgctactcacgctcagccagccctggtcacagctccgaatgagacatcccctaagatgcccttccgggcacctccggccaattcgctggctgcaggcaaggataagacagtaggcgctgggagccaggaggagcagagtccagaggcgccggactcccccagtcccatctccagcttcttcagcggcgctgggagcaagcagctgccgcaggccatcatcatcggggtgaagaagggcggcacgcgggcattgctggagttcctgcgcgtgcaccccgacgtgcgcgccgtgggcgccgagccccactttttcgaccgcagctaccacaagggtcttgcctggtaccgagacttgatgcccagaaccctcaagggacagatcaccatggagaagacgcccagctactttgtgacccgggaggcacccgcgcgcatctcggccatgtccaaggacaccaagctcatcgtggtggtgcgcgacccggtgaccagggccatctcggactacacgcagacgctgtccaagcggccggacatccccagcttcgagagcctgacgttccgcaaccgcagcgcgggcctcatagacacgtcctggagcgccatccagatcggcctgtacgccaagcacctggagccctggctgcgccacttcccgctcggccagatgctcttcgtgagcggggagcggctggtcagcgacccggccggcgagctgcgccgcgtgcaggatttcctgggcctcaagcgcatcatcaccgacaagcacttctacttcaaccagaccaagggcttcccgtgcctcaagaaggcggagggcagcggcaagccgcactgcctgggcaagactaagggccgcgcgcaccccaccatcgcgcgcgaggtgctgcggcagctgcgtgacttttaccggcccttcaaccgcaagttctaccagatgaccggccgcgacttcggctgggactgagtctcccctcgcagcttatctattgagagagagtatatgtatgtaaaatgtacagaaatctattttataataatttatttttaattcacgagcaattaattcactaagctgcctagccacaatctgcagagagttcgaatcacggtctgttaacattccagagtgtttaactccgatgttttgttctgtccctcacaatcgatggtgcttccatgttctcttccccctctccccactgtatttaagaagaagaaaagcacaacttgagaatttttgttacgggtattcagccttcagtcaccttgggtcttccacctgctatctccttgggtcttggctgcctcagctgggtgtggtattttcttgcctggataccctcccggaagcactgagctgcctcagtgtgctgtagtcggaaggtggaattcacttaagcagttcattaccctcagtgacatagcacctaggtgcatttctcccgcctcccttacagggatgtccttatgaccccgactcccctcctcctcctctaccctccgtccattattcagctggaagtgtatgcaaacacttgatccctttcccaggtcccatgtgtcagaggcttgggtgctgcttt

SEQ ID NO: 1796 - protein, 390 aa, Mus musculus
MGQRLSGGRSCLDVPGRFLPQPPPPPPPVRRKLALLFAMLCIWLYMFLYSCAGSCTAAPGLLLLGSGSRATHAQPALVTAPNETSPKMPFRAPPANSLAAGKDKTVGAGSQEEQSPEAPDSPSPISSFFSGAGSKQLPQAIIIGVKKGGTRALLEFLRVHPDVRAVGAEPHFFDRSYHKGLAWYRDLMPRTLKGQITMEKTPSYFVTREAPARISAMSKDTKLIVVVRDPVTRAISDYTQTLSKRPDIPSFESLTFRNRSAGLIDTSWSAIQIGLYAKHLEPWLRHFPLGQMLFVSGERLVSDPAGELRRVQDFLGLKRIITDKHFYFNQTKGFPCLKKAEGSGKPHCLGKTKGRAHPTIAREVLRQLRDFYRPFNRKFYQMTGRDFGWD

SEQ ID NO: 1797 - DNA, 5165 bp, Mus musculus
gcggcgacggaggaggctggcgaaaaaagaaagctaacctgaatattgggagaggaaaaaaacagagaagagaaataaggatagaagaaaagattttccagtttgaataatatttccctcatggatacatttcatagcattattatgtgatatgagaagttatttttctttctttgaagtaacatggattttatactacagaatcaagagaattggctttatagcaaattttgatatataaaaagtggtacaggtttttatagataaccatgacaacatcatatatgaatgggcatgtaacagaggaatcagacagcggaataaaaaatcttgatcttgcatcaccagaggaatatccgaagcaccgagagatggctgttgactgccctggagatttgggcaccagaatgatgccagtgcgaagaagtgcacagttagagcggattcgacaacaacaggaggatatgagacgtaggcgcgaagaggaagggaaaaagcaagaacttgacctaaattcttccatgagacttaagaaactagctcaaattcctccaaagactggaatagataaccctatatttgacacggaagaaggaattgttttagaaagtcctcactatgctgtgaacatattagacgttgaagacttgttctcttcacttaaacacatccaacacactttggttgattctcagagccaggaggatatctcactgcttttacagcttgtacaaaacagagattttcagaatgcattcaagatacacaatgctgtcacagtacacatgagcaaggccagccctccgtttcctcttatcgccaatgtacaagaccttgtacaagaggtacaaactgtcttaaagccagtccatcagaaggaaggacaagaactaactgccttgttgaatgctccacatattcaggcacttttactggcccatgataaggttgctgagcaggaaatgcagctagagcccattacagatgagagagtttatgaaagtatcggccattacgggggagaaactgtaaaaatagttcgtatagaaaaggctcgggatattccattgggtgccacagttcgtaatgaaatggattctgtcatcataagccggatagtgaaaggaggcgccgcagagaagagtggcctcctgcacgaaggagacgaagttctggagatcaacggcattgaaatccggggcaaggatgtcaatgaggtttttgacttgttgtctgatatgcatggtactttgacatttgttctgattcctagtcaacagatcaagccccctcctgccaaagaaactgtaatccatgtgaaagctcattttgactatgacccctcagatgacccttatgttccatgtcgagagttagggctgtcttttcaaaaaggagatatacttcatgtgatcagtcaagaagatccaaattggtggcaggcctatagagagggagacgaagataatcagcctctagctggacttgttccaggcaaaagctttcagcagcaaagggaagccatgaagcaaactatagaagaagataaggagccagagaaatcaggaaaactgtggtgtgcaaagaagaataaaaagaagaggaaaaaggttttatataatgccaataaaaatgatgattatgacaatgaagagatcttaacgtatgaggaaatgtcactttatcaccagccagcaaataggaaaagacctatcatcttgatcggtccacagaactgtggccagaatgaactgcgccagagactaatgaataaggaaaaagaccgctttgcatctgccgttcctcatacaactcggaataggcgagaccatgaagtagctgggagagattaccactttgtttctcggcaagcatttgaagcagacatagcagctggcaagttcattgaacatggtgaatttgagaaaaatctgtatggaaccagcatagactctgtacgacaagtaatcaactctggcaagatatgtctcttaagtcttcgcacacagtccttgaagaccctccggaattcagatttgaaaccatatatcatcttcattgcaccaccttcacaagagagacttcgggcgttgttagccaaggaaggcaagaacccaaagcctgaagaattaagggagatcattgagaagacgagagagatggagcagaacaacggacactacttcgacactgcaattgtgaattcagatcttgataaagcctatcaggaattgcttaggctcattaacaaactggatactgaacctcagtgggtgccatccacctggctaaggtgaaggaaaggactgttctgtgtcatcatgatgaactttatttggcaaaccgccaacaggaggatagccttaacgctgagagttcatgtcttaaactagtgagaaaggtccattaggcaatttgtacataacacttcctgcacattgctttaggggaccttgacttgtttggagactgaaaatggaaactttcttcagagcatttttgatttatcctggtaaaaccttttgttttcacctttctgactctttgcctctgggtcagatgtctataaaaaacatgtatgtatatatgcaatagtccattgtctcacatagatatgaatattaacattatttaacatttaacttaaatgacttcatgggattgagagaaggggctgtgcttctgtgcgctgagaataacagtattttcttaaacaactgacttggtcatcagaaatatttcttaaaaaagaaaagaaaaaaggtgccactttagtttggagcaactttttaagtttaaatttattggttttatcttttcattctgaaaatcattccattaaaagtactagttttgctgggcatggaaatgcacgcctttagtcccacactcaagagacagaggcaggtagagctctgagttcagggccagactggtttacagagtgagttccaggccagtcaagtctacacagagaaaccttgtctcaaaaaaccaaaaataaaaaaatagagaatgcagcctccagtgtagttacaagtatacaaaagatgctgacatttttaaagatagaattttccaaattactttattaaattgtgatgatttgatagtcttgactccttgttctgataaagagttcatataaaactatgttgaccattaaaacttcttccttgtgatgcaaattttttttatgtcagtgaaaggacataacacatttgacagtttctgtatactgatatttaatagattaataaatagttgtgttctgcattggaataaagttttatacatacatacacactgaggaaatactgacaactaacttagagatcataaggaagtaagtcattgagcattttagaaaaggacatcaggagttttattaagcgtgtacagacaagtttttatcctaacagtcttccttgtgagtgaaatacagcagcttgctaaatcttaaatgttcatgctaacgggatttttgtactgtctctttagctatagctttaaaattgtctacaaatccacaaagaaagttaccttgtagtcgtctcaagcctttaaggagaatgttctgtgtgacaaccaacctcaaatgtgaatgtcttgattttatgtagctacagaatttcatgttcccaaaactaaacactggaatgacactgatgtgtcacttagcacaagcagttggtgttgatgtcttgtcagtgctgtttgtgtctgatttctcttctggataatcttattggaacaaatgtagagtgtttgtgatgtctttttatgttcagttttgcatggcttttgtagttggctggcaagtgtgtctattagaaatactttcaaaataattttccttaggaataagcacattcttgggttgagggaaggaatgctatgctatacggtctgaagtctgaacactcccagtttacagcaggaaaagttaacgccttgtcagcactgacggtcaggtcacttagcacgtaagggattaaatctgtccaggttttcactggttttcccctcaggaatgaaaggtagtctatggtcagtagagctttgtgatctgcgtgccgaccaaaaatactgcctggtgagacttggtgaatacctgtaaccctataggaagatctaaagtttaaggctggtctaagttacatcagactatctcaaaataaataaataaatatctttttttaatgagaaagaaaagcatggatgaaaggatgaatattggatttaagtaaagttttaagttagtgtcagtggggctatgtgctatcaagactctcacacagacctttacagcagagcctatacccaggcacttgccatgccaccatgtagtttttgactgagattctccaggtcagcgagatcctatactttacttgtaagtcatgataggatagtgtacatcctgagcttttgtaaatcctaatggttatgaatgtactaatgctcaacatagtcctaaacagtgaaaagttagcctctgctttaaaaaaaagccttgttttacctgtgattgtatgccattagggccaattcaatttcctatccctctgtggttctgactggaaactgctgtgccaggaagccctagccacttacagaaaaatcgtggttggctgggaacacagctcagtcggtaaagtatcgcctagtatgcacaaaaccctggctgtggcagaaagccagcatgggtgttcatgggtgtaatcccagcacttggaaagtggaagcagacagatctgcagctcaaggttaccatcagctacaggagaccctgtctcaaaaacaaagtaggtaactccagctaatgacatgtccccgggaaatccaaacaaggaagtaccttcatttttttcatacttaagaataaataggtagtactttgacttgtccacattagctttctgtgaaaatctagtgtatggattattttccttctctcatggcctaaggagtaaatattgataaggaatgatttgaatgtaattttttcgaatgtgtggaaaatatgaagcagggatttatccttaatgaaggtagccactgacatttgttgttgatctccctttgtactgtcttgtttctgcactcgtcattttgagatattatactgcacaatgtattataaaaataaaaagtaaaactat

SEQ ID NO: 1798 - protein, 675 aa, Mus musculus
MTTSYMNGHVTEESDSGIKNLDLASPEEYPKHREMAVDCPGDLGTRMMPVRRSAQLERIRQQQEDMRRRREEEGKKQELDLNSSMRLKKLAQIPPKTGIDNPIFDTEEGIVLESPHYAVNILDVEDLFSSLKHIQHTLVDSQSQEDISLLLQLVQNRDFQNAFKIHNAVTVHMSKASPPFPLIANVQDLVQEVQTVLKPVHQKEGQELTALLNAPHIQALLLAHDKVAEQEMQLEPITDERVYESIGHYGGETVKIVRIEKARDIPLGATVRNEMDSVIISRIVKGGAAEKSGLLHEGDEVLEINGIEIRGKDVNEVFDLLSDMHGTLTFVLIPSQQIKPPPAKETVIHVKAHFDYDPSDDPYVPCRELGLSFQKGDILHVISQEDPNWWQAYREGDEDNQPLAGLVPGKSFQQQREAMKQTIEEDKEPEKSGKLWCAKKNKKKRKKVLYNANKNDDYDNEEILTYEEMSLYHQPANRKRPIILIGPQNCGQNELRQRLMNKEKDRFASAVPHTTRNRRDHEVAGRDYHFVSRQAFEADIAAGKFIEHGEFEKNLYGTSIDSVRQVINSGKICLLSLRTQSLKTLRNSDLKPYIIFIAPPSQERLRALLAKEGKNPKPEELREIIEKTREMEQNNGHYFDTAIVNSDLDKAYQELLRLINKLDTEPQWVPSTWLR

SEQ ID NO: 1799 - DNA, 2808 bp, Mus musculus
gagggccgccagacggagggctgttgcttgggctgcgttgaggagcgagggagggagagaggatcggcggccgccggggcttggagaaaaaagaaagctaacctgaatattgggagaggaaaaaaacagagaagagaaataaggatagaagaaaagattttccagtttgaataatatttccctcatggatacatttcatagcattattatgtgatatgagaagttatttttctttctttgaagtaacatggattttatactacagaatcaagagaattggctttatagcaaattttgatatataaaaagtggtacaggtttttatagataaccatgacaacatcatatatgaatgggcatgtaacagaggaatcagacagcggaataaaaaatcttgatcttgcatcaccagaggaatatccgaagcaccgagagatggctgttgactgccctggagatttgggcaccagaatgatgccagtgcgaagaagtgcacagttagagcggattcgacaacaacaggaggatatgagacgtaggcgcgaagaggaagggaaaaagcaagaacttgacctaaattcttccatgagacttaagaaactagctcaaattcctccaaagactggaatagataaccctatatttgacacggaagaaggaattgttttagaaagtcctcactatgctgtgaacatattagacgttgaagacttgttctcttcacttaaacacatccaacacactttggttgattctcagagccaggaggatatctcactgcttttacagcttgtacaaaacagagattttcagaatgcattcaagatacacaatgctgtcacagtacacatgagcaaggccagccctccgtttcctcttatcgccaatgtacaagaccttgtacaagaggtacaaactgtcttaaagccagtccatcagaaggaaggacaagaactaactgccttgttgaatgctccacatattcaggcacttttactggcccatgataaggttgctgagcaggaaatgcagctagagcccattacagatgagagagtttatgaaagtatcggccattacgggggagaaactgtaaaaatagttcgtatagaaaaggctcgggatattccattgggtgccacagttcgtaatgaaatggattctgtcatcataagccggatagtgaaaggaggcgccgcagagaagagtggcctcctgcacgaaggagacgaagttctggagatcaacggcattgaaatccggggcaaggatgtcaatgaggtttttgacttgttgtctgatatgcatggtactttgacatttgttctgattcctagtcaacagatcaagccccctcctgccaaagaaactgtaatccatgtgaaagctcattttgactatgacccctcagatgacccttatgttccatgtcgagagttagggctgtcttttcaaaaaggagatatacttcatgtgatcagtcaagaagatccaaattggtggcaggcctatagagagggagacgaagataatcagcctctagctggacttgttccaggcaaaagctttcagcagcaaagggaagccatgaagcaaactatagaagaagataaggagccagagaaatcaggaaaactgtggtgtgcaaagaagaataaaaagaagaggaaaaaggttttatataatgccaataaaaatgatgattatgacaatgaagagatcttaacgtatgaggaaatgtcactttatcaccagccagcaaataggaaaagacctatcatcttgatcggtccacagaactgtggccagaatgaactgcgccagagactaatgaataaggaaaaagaccgctttgcatctgccgttcctcatacaactcggaataggcgagaccatgaagtagctgggagagattaccactttgtttctcggcaagcatttgaagcagacatagcagctggcaagttcattgaacatggtgaatttgagaaaaatctgtatggaaccagcatagactctgtacgacaagtaatcaactctggcaagatatgtctcttaagtcttcgcacacagtccttgaagaccctccggaattcagatttgaaaccatatatcatcttcattgcaccaccttcacaagagagacttcgggcgttgttagccaaggaaggcaagaacccaaagcctgaagaattaagggagatcattgagaagacgagagagatggagcagaacaacggacactacttcgacactgcaattgtgaattcagatcttgataaagcctatcaggaattgcttaggctcattaacaaactggatactgaacctcagtgggtgccatccacctggctaaggtgaaggaaaggactgttctgtgtcatcatgatgaactttatttggcaaaccgccaacaggaggatagccttaacgctgagagttcatgtcttaaactagtgagaaaggtccattaggcaatttgtacataacacttcctgcacattgctttaggggaccttgacttgtttggagactgaaaatggaaactttcttcagagcatttttgatttatcctggtaaaaccttttgttttcacctttctgactctttgcctctgggtcagatgtctataaaaaacatgtatgtatatatgcaatagtccattgtctcacatagatatgaatattaacattatttaacatttaacttaaatgacttcatgggattgagagaaggggctgtgcttctgtgcgctgagaataacagtattttcttaaacaactgacttggtcatcagaaatatttctt

SEQ ID NO: 1800 - protein, 675 aa, Mus musculus; identical to SEQ ID NO: 1798

SEQ ID NO: 1801 - DNA, 1483 bp, Mus musculus
gggcacagggcagcggagggcgattggccgcgacgagccagcactgagagagcaggcgcctgaggcgacagatcggcggccactggcccagtaccgggtccgtgaagggaaaagtccgggacacgattgccctcggtggcagggcggcccaatccaaactgccctggtccctgctcccgtcagtctaagaggctcgcagtcgcttggggcggccgccatcccgagggcggggctctgggaattgggtatctggaccgccgcggtctgttcctcccgccactcgcaccaggtggtgacaccatccagccggtgaccatgttcgacaagacgcggctgccgtacgtggccctcgatgtgatttgcgtgttgctggctgccatgcctatgactattttaaaattgggcaaagtatatccatttcagaggggctttttctgtactgacaacagcgtgaagtacccgtaccatgacagtaccatcccgtcccgtatactcgccatactggggcttggcttacccattttctctatgagtattggagaatctctgtctgtttactttaatgtcttgcattcgaattcctttgtcggcaatccctacatagccaccatttacaaagccgtcggagcctttttgttcggagtctcagctagtcagtccttgactgacatcgctaagtatactataggcagtttgcggccgcacttcttggctatctgtaacccagactggtcaaaaatcaactgcagtgatggctatattgaggactacatatgtcaagggaatgaagagaaagtcaaggagggcaggttgtctttctactcgggacactcttcattctctatgtactgcatgctgtttgtcgcactttatcttcaagccaggatgaagggagactgggcaagactcttacgacccatgctccagtttgggctcattgctttttccatatatgtgggcctttctcgagtgtctgactacaaacaccactggagtgacgtcacagttggactcattcagggagctgctatggctatactggttgctttgtatgtatccgatttcttcaaggacacacattcttacaaagagagaaaggaagaggatccacacacgactctccatgaaaccgccagttcacggaactactcaaccaatcacgagccctgaagggtacaggggcgctggcccgcttcaaaggcaacagctggaggctaaaggcagggggatgcgtattacttcctgctgtacagaccattctataaaggactgctgctatctatacctcctggatgcccattttatgtgtgtacagttacttctaacacaatgagtaacagttcaattaaagaaaatgaagcctgtcactaaaacactgtcccacctgtacatttttattgaaagacgctatgtacaaatgtgtatgttacatgccttctcagaatgatgttgacttaaatataataaaaagcttgtgaaccac

SEQ ID NO: 1802 - protein, 213 aa, Mus musculus
MSIGESLSVYFNVLHSNSFVGNPYIATIYKAVGAFLFGVSASQSLTDIAKYTIGSLRPHFLAICNPDWSKINCSDGYIEDYICQGNEEKVKEGRLSFYSGHSSFSMYCMLFVALYLQARMKGDWARLLRPMLQFGLIAFSIYVGLSRVSDYKHHWSDVTVGLIQGAAMAILVALYVSDFFKDTHSYKERKEEDPHTTLHETASSRNYSTNHEP

SEQ ID NO: 1803 - DNA, 1212 bp, Mus musculus
gcgacgagccagcactgagagagcaggcgcctgaggcgacagatcggcggccactggcccagtaccgggtccgtgaagggaaaagtccgggacacgattgccctcggtggcagggcggcccaatccaaactgccctggtccctgctcccgtcagtctaagaggctcgcagtcgcttggggcggccgccatcccgagggcggggctctgggaattgggtatctggaccgccgcggtctgttcctcccgccactcgcaccaggtggtgacaccatccagccggtgaccatgttcgacaagacgcggctgccgtacgtggccctcgatgtgatttgcgtgttgctggctggattgccttttgcaattcttacttcaaggcatacccccttccagcgaggaatattctgtaatgatgactccatcaagtacccttacaaggaagacaccataccttatgccttattaggtggaatagtcattccattctgtattatcgttatgagtattggagaatctctgtctgtttactttaatgtcttgcattcgaattcctttgtcggcaatccctacatagccaccatttacaaagccgtcggagcctttttgttcggagtctcagctagtcagtccttgactgacatcgctaagtatactataggcagtttgcggccgcacttcttggctatctgtaacccagactggtcaaaaatcaactgcagtgatggctatattgaggactacatatgtcaagggaatgaagagaaagtcaaggagggcaggttgtctttctactcgggacactcttcattctctatgtactgcatgctgtttgtcgcactttatcttcaagccaggatgaagggagactgggcaagactcttacgacccatgctccagtttgggctcattgctttttccatatatgtgggcctttctcgagtgtctgactacaaacaccactggagtgacgtcacagttggactcattcagggagctgctatggctatactggttgctttgtatgtatccgatttcttcaaggacacacattcttacaaagagagaaaggaagaggatccacacacgactctccatgaaaccgccagttcacggaactactcaaccaatcacgagccctgaagggtacaggggcgctggcccgcttcaaaggcaacagctggaggctaaaggcagggggatgcgtattacttcct

SEQ ID NO: 1804 - protein, 353 aa, Mus musculus
REKSGTRLPSVAGRPNPNCPGPCSRQSKRLAVAWGGRHPEGGALGIGYLDRRGLFLPPLAPGGDTIQPVTMFDKTRLPYVALDVICVLLAGLPFAILTSRHTPFQRGIFCNDDSIKYPYKEDTIPYALLGGIVIPFCIIVMSIGESLSVYFNVLHSNSFVGNPYIATIYKAVGAFLFGVSASQSLTDIAKYTIGSLRPHFLAICNPDWSKINCSDGYIEDYICQGNEEKVKEGRLSFYSGHSSFSMYCMLFVALYLQARMKGDWARLLRPMLQFGLIAFSIYVGLSRVSDYKHHWSDVTVGLIQGAAMAILVALYVSDFFKDTHSYKERKEEDPHTTLHETASSRNYSTNHEP

SEQ ID NO: 1805 - DNA, 812 bp, Mus musculus
gaggactgcgccagtagacagaacagcctgagccaggatgaaggctctcagggctgtcctcctgatcttgctactaagtggacagccagggagtggctgggcacaagaagatggtgatgcggacccggagccagagaactacaactacgatgatgacgatgatgaagaggaagaggaggagaccaacatgatccctggaagcagggacagagcacctctacaatgctacttctgtcaagtgcttcacagcggggagagctgcaatcagacacagagctgctccagcagcaaacccttctgcatcacgctcgtctcccacagcggaaccgacaaaggttacctgactacctactccatgtggtgtactgatacctgccagcccatcatcaagacagtgggaggcacccagatgactcagacctgttgccagtccacactgtgcaatattccaccctggcagaacccccaagtccagaaccctctgggtggccgggcagacagccccctggaaagtgggactagacatcctcagggtggcaagtttagccacccccaggttgtcaaggctgctcatcctcagagcgatggggctaacttgcctaagagtggcaaggctaaccagccccagggaagtggggcaggatacccttcaggctggaccaaatttggtaatatagccctcctgctcagcttcttcacttgtctgtgggcgtcaggggcctgaagacccgttctcctccaaccaggacgccctggcctctccttcctgacaaccagcttcagagaataaacttgaatgtcgtttgccatct

SEQ ID NO: 1806 - protein, 228 aa, Mus musculus
MKALRAVLLILLLSGQPGSGWAQEDGDADPEPENYNYDDDDDEEEEEETNMIPGSRDRAPLQCYFCQVLHSGESCNQTQSCSSSKPFCITLVSHSGTDKGYLTTYSMWCTDTCQPIIKTVGGTQMTQTCCQSTLCNIPPWQNPQVQNPLGGRADSPLESGTRHPQGGKFSHPQVVKAAHPQSDGANLPKSGKANQPQGSGAGYPSGWTKFGNIALLLSFFTCLWASGA

SEQ ID NO: 1807 - DNA, 3045 bp, Mus musculus
tggcggcccgcaggagaggggggaggagaaagcagagaagagtgggggctggcggccgaggaaaaagggaagggtctccgagagtagacgcgcgggggactcggcgagggtgcgtccggagcagcgacaactccgagcgtcccagcgggccagcgaggaggatggtggcggccgggcgcggaccagcccggccgcgggcgccgtgagccggagcgcagcgcccggcatgcggctgcggtccccggcctcggccccgctccgcccccgccgagcgccccagccgagcggcgcgcatcatgccgcgggtgcccgcgaccctctacgcctgtctgctcgggctctgcgcgctcgttccgcgcctcgcagggctcaacatatgcactagtggaagtgccacctcgtgtgaagaatgcctgttgatccacccaaaatgtgcctggtgctccaaagaggtattctttggcaatccacggtccatcacctctggtgtgaccgaagcaaacctcatccggaatggctgtgaaggtgagattgagccacacacccacgtcctccggaacctacctctcagcaagggttccagtgccacgggctctgacgtcatccagatgacgccgcagattgcagtgagcctccggccaggcgagcagactacgttccagctgcaggtgcgccaggtggaggactaccctgtagacctgtactacctgatggacctctccctctccatgaaggatgacttggagaacatccggagcctgggcaccaagcttgcggaggaaatgaggaagctcactagtaacttccgcttaggtttcgggtcttttgttgacaaggacatctctcctttctcctacacggcaccgagataccagaccaatccgtgtattggttacaagttattccccaactgcgtcccctccttcgggttccggcatctgctgcctctcacagacagagtcgacagcttcaacgaggaagtgaggaagcagagggtgtcccggaaccgagatgcccccgagggggggtttgatgcggtcctccaggctgctgtctgcaaggagaagatcggatggcgaaaagatgctctgcacttgctggtgttcacaacagacgatgtgccccacatcgcactggatggaaaactgggtggcctggtccagccccacgatggccagtgtcacctgaatgaagccaatgagtacacagcctctaaccagatggactatccatcgcttgccttgcttggggagaagctggcagagaacaatatcaacctcatttttgctgtgacgaagaaccactatatgctctacaagaattttacagccctgatacctggaaccactgtggagattttgcatggagattccaaaaatattattcaactgattatcaatgcgtacagtagcatccgggctaaagtggagctgtcagtgtgggatcagccagaagaccttaatctcttcttcactgccacctgccaagatggcatatcttaccctggtcagaggaagtgtgagggtctgaagattggggacacggcatcctttgaagtgtccgtggaggctcggagctgccccggcagacaagcagcacagtctttcaccttgaggcccgtgggcttccgggacagtctgcaggtggaagtcgcctacaattgcacatgcggctgtagcacggggctggagcccaacagtgccagatgcagtgggaatggaacatacacctgtgggctgtgcgagtgtgaccccggctacctgggcactaggtgcgagtgccaggagggggagaaccagagcgggtaccagaacctgtgccgggaggcagagggcaagcctctgtgcagcgggcgtggagagtgtagctgcaaccagtgctcctgcttcgagagtgagttcgggaggatctacggacctttctgcgagtgtgacagcttttcctgtgccagaaacaagggcgtcctatgctcaggccatggagagtgtcactgtggagaatgcaaatgccacgcaggttacattggggacaattgtaactgctcaacagacgtcagcacatgcagggccaaggatgggcagatctgcagtgaccgaggccgttgtgtctgtgggcagtgccagtgcacagagcctggagcctttggggagacgtgtgagaagtgcccaacctgcccggatgcttgcagctctaagagagactgtgtcgaatgcttgctacttcaccaggggaaacctgacaaccagacctgccaccaccagtgcaaagatgaggtgatcacgtgggtagacaccatcgtcaaagatgaccaggaggctgtgctttgcttctacaaaactgctaaggactgcgttatgatgttcagctacacagaactgcccaatgggaggtccaacttgacggtcctccgggagccagaatgtggaagtgcccccaatgccatgaccatcctgctggctgtggttggcagcatcctcctgattgggatggcactcctggccatctggaagctgctcgtcaccatccacgaccgccgagagtttgccaagttccaaagcctcaaaccccctgtacagaaagcccatctccacacacactgtcgatttcgccttcaacaagttcaacaaatcctacaatggctcagtggactgaggctcctggatggctggagggggactaaggatgaagactctggcgtgccttggacttcctggaccatttgctcacgctagctaggcacgcacggataatggagatgccctccattgagccctaagggacctggtagccacacagcgggccacaggcacttggggccacttccctccaagccagggaaagcaaggagactctggtgttctcagcttcccctctgccgcctccagcttgctgtctccatgaacctctgaaggcctggctgccctcttccctgctgggccagacaagaaggtatccggaagagtctgtgtgtacaaagctagcgcgcagcctggctttttccagttgatcgtttttttttctatgaaataaaaaggtcacgcattt

SEQ ID NO: 1808 - protein, 811 aa, Mus musculus
MPRVPATLYACLLGLCALVPRLAGLNICTSGSATSCEECLLIHPKCAWCSKEVFFGNPRSITSGVTEANLIRNGCEGEIEPHTHVLRNLPLSKGSSATGSDVIQMTPQIAVSLRPGEQTTFQLQVRQVEDYPVDLYYLMDLSLSMKDDLENIRSLGTKLAEEMRKLTSNFRLGFGSFVDKDISPFSYTAPRYQTNPCIGYKLFPNCVPSFGFRHLLPLTDRVDSFNEEVRKQRVSRNRDAPEGGFDAVLQAAVCKEKIGWRKDALHLLVFTTDDVPHIALDGKLGGLVQPHDGQCHLNEANEYTASNQMDYPSLALLGEKLAENNINLIFAVTKNHYMLYKNFTALIPGTTVEILHGDSKNIIQLIINAYSSIRAKVELSVWDQPEDLNLFFTATCQDGISYPGQRKCEGLKIGDTASFEVSVEARSCPGRQAAQSFTLRPVGFRDSLQVEVAYNCTCGCSTGLEPNSARCSGNGTYTCGLCECDPGYLGTRCECQEGENQSGYQNLCREAEGKPLCSGRGECSCNQCSCFESEFGRIYGPFCECDSFSCARNKGVLCSGHGECHCGECKCHAGYIGDNCNCSTDVSTCRAKDGQICSDRGRCVCGQCQCTEPGAFGETCEKCPTCPDACSSKRDCVECLLLHQGKPDNQTCHHQCKDEVITWVDTIVKDDQEAVLCFYKTAKDCVMMFSYTELPNGRSNLTVLREPECGSAPNAMTILLAVVGSILLIGMALLAIWKLLVTIHDRREFAKFQSLKPPVQKAHLHTHCRFRLQQVQQILQWLSGLRLLDGWRGTKDEDSGVPWTSWTICSR

SEQ ID NO: 1809 - DNA, 1200 bp, Mus musculus
agatgcccagaatcccagaggggagcaatggcgtcaacaatgctgcttctgctggtggcagtcgcccagaccctgatcgagatccgcgcggccccgcgccctgctcccctcccggcccgctcacccgccgggggtcccggaaggagttcggggtctcaccgcgccctgcctccaggcccacacttgctgagttatttctacacctccgtgtcccggccgggccttggggagccccggttcatctctgtcggttacgtggacaacacggagttcgtgcgcttcgacagcgacgcggagaatccgagatatgagccgcgggcaccgtggatggagcaggaggggccggagtattgggagcgggaaacacagaaagccaagggcaatgagcagattttccgagtgaacctgaggaccctgctcagctactacaaccagagcgcgggcggctctcacactattcaggtgatctctggctgtgaagtggggtccgacgggcgcctcctccgcgggtaccagcagttcgcctacgacggccgcgattacatcgccctgaacgaagacctgaaaacgtggacggcggcggacatggcggcacagatcacccgacgcaagtgggagcaggctggtgctacagagaaaagcaaggcctacctggagggcgcgtgcgtgcagtccctccgcagatacctggagctcgggaaggagacgctgctgcgcacagatcctccaaaggcacatgtgacatgtcaccacagatctgacggtgatgtcaccctgaggtgctgggccctgggcttctaccctgctaacatcatcctgacctggcagttgaatggggaggagctgacccaggacatggagcttgtggagaccaggccttcaggggatggaaccttccagaagtgggcatctgtggtggtgcctcttgggaaggagcagaattacacatgccatgtgcaccatgaggggctgcctgagcccctcaccctgagatggggtaaggaggagcctcctccatccactgtctccaacatggcgaacgtagctgttctggttgtccttggagctgccatcattgcagctgtggtggcttttgtgatgaagagaaggagacacacaggtggacaaggaggggactatgctctggctccaggcagggatagctcccagagctctgatatgcctctcccagattttaaa

SEQ ID NO: 1810 - protein, 299 aa, Mus musculus
RYEPRAPWMEQEGPEYWERETQKAKGNEQIFRVNLRTLLSYYNQSAGGSHTIQVISGCEVGSDGRLLRGYQQFAYDGRDYIALNEDLKTWTAADMAAQITRRKWEQAGATEKSKAYLEGACVQSLRRYLELGKETLLRTDPPKAHVTCHHRSDGDVTLRCWALGFYPANIILTWQLNGEELTQDMELVETRPSGDGTFQKWASVVVPLGKEQNYTCHVHHEGLPEPLTLRWGKEEPPPSTVSNMANVAVLVVLGAAIIAAVVAFVMKRRRHTGGQGGDYALAPGRDSSQSSDMPLPDFK

SEQ ID NO: 1811 - DNA, 1958 bp, Mus musculus
atgggggcgatggcgccgcgcacgctgctcctgctgctggcggctgccctggccccgacccagacccaggcaggctcacactccatgaggtatttcgaaacctccgtttcccggccgggccttggggagccccggttcattattgtcggttacgtggacgacacgcagttcgtgcgcttcgacagcgacgcggagactccgaggatggagccgcgggcgccttggatggagcaggaggggccggagtattgggagcgggagacacagagagccaagggcaatgagcagagtttccatgtgagcctgaggaccctgctcggctactacaaccagagcgagagcggctctcacacgatccagtggatgtatggctgtaaagtggggtccgacgggcgcttcctccgcgggtacctgcaatacgcatacgacggccgcgattacattgccctgaacgaagacctgaaaacgtggacggcagcggacgtggcggcgattatcacccgacgcaagtgggagcaggctggtgctgcagagtattacagggcctacctggaggccgagtgcgtggagtggctcctcagatacctggagctcgggaaggagacgctgctgcgcacagatcccccaaagacacatgtgacccatcacccaggatctgaaggtgatgtcaccctgaggtgttgggccctgggcttctaccctgctgacatcaccctgacctggcagttgaatggggaggagctgacccaggacatggaactggtggagaccaggcctgcaggggatggaaccttccagaagtgggcatctgtggtggtgcctcttgggaaggagcagaattacacatgccatgtgtaccatgaggggctgcctgagcccctcaccagatgggaacctcctccttccactgactctatcatgtcacacattgcttctgctgtggccatcattaaagctctggtggtatttgtgatgaagagaaggagaaacacaggtaggaaagggcagggtctgagttttctctcagcctcctttagagtgtgctctgctcattaatgggaaacacagccacaccccacattgctactgactcaaactgggtctgctgtcagttctgggaacttcctagtgtcaagatcttctttgaactctcacatcttttcctctcacaggtagaaaaagaggggactatgctcccgctccaggttagtgtggggacaggattgtcctggggacattgcagtgaagctggagatgttgggagctctgggaatccataataactcttccagagaaatcttctgggggcttgggttttagcttgctatgaatatatctctatatatttcttaacctaggcagggatagctcccagagctctgatatgcctctcccagattttaaaggtgacactctggggccagattggggaagagcaaggtggatatgattgggtttcagggagtcccagaatcccctgtgattgagtgatgggttgttggggtgttgacttcatagtgatggttcatgactctcattctctagtgtgaagacacctgactggagtggactgagtgacaaccagtgtgttcaggtctctcctgtgacatccagagccctcagttctctttagacaacagtgtctgatgttctctgtgttcctgtgggctcaatgtgaagaactgtgtagcccagcctgccctgcacaccaggaccctgtccctgcattgcttgctcccttctacagtcagccttccaactccagccaaacactgggagacatctgcatcctgtgagctccacgctaccctaagctgcagctcctcacttccacactgagaataagaatctggatgtgaactttattgttcatatccttgatctgagggttgattgacaggtaaactaaagaattaagaatacttagagtttgtggaggaaataaatggcagatggag

SEQ ID NO: 1812 - protein, 335 aa, Mus musculus
MGAMAPRTLLLLLAAALAPTQTQAGSHSMRYFETSVSRPGLGEPRFIIVGYVDDTQFVRFDSDAETPRMEPRAPWMEQEGPEYWERETQRAKGNEQSFHVSLRTLLGYYNQSESGSHTIQWMYGCKVGSDGRFLRGYLQYAYDGRDYIALNEDLKTWTAADVAAIITRRKWEQAGAAEYYRAYLEAECVEWLLRYLELGKETLLRTDPPKTHVTHHPGSEGDVTLRCWALGFYPADITLTWQLNGEELTQDMELVETRPAGDGTFQKWASVVVPLGKEQNYTCHVYHEGLPEPLTRWEPPPSTDSIMSHIASAVAIIKALVVFVMKRRRNTGRKG

SEQ ID NO: 1813 - DNA, 1471 bp, Mus musculus
atgggggcgatggcgccgcgcacgctgctcctgctgctggcggctgccctggccccgacccagacccaggcaggctcacactccatgaggtatttcgaaacctccgtttcccggccgggccttggggagccccggttcattattgtcggttacgtggacgacacgcagttcgtgcgcttcgacagcgacgcggagactccgaggatggagccgcgggcgccttggatggagcaggaggggccggagtattgggagcgggagacacagagagccaagggcaatgagcagagtttccatgtgagcctgaggaccctgctcggctactacaaccagagcgagagcggctctcacacgatccagtggatgtatggctgtaaagtggggtccgacgggcgcttcctccgcgggtacctgcaatacgcatacgacggccgcgattacattgccctgaacgaagacctgaaaacgtggacggcagcggacgtggcggcgattatcacccgacgcaagtgggagcaggctggtgctgcagagtattacagggcctacctggaggccgagtgcgtggagtggctcctcagatacctggagctcgggaaggagacgctgctgcgcacagatcccccaaagacacatgtgacccatcacccaggatctgaaggtgatgtcaccctgaggtgttgggccctgggcttctaccctgctgacatcaccctgacctggcagttgaatggggaggagctgacccaggacatggaactggtggagaccaggcctgcaggggatggaaccttccagaagtgggcatctgtggtggtgcctcttgggaaggagcagaattacacatgccatgtgtaccatgaggggctgcctgagcccctcaccagatgggaacctcctccttccactgactctatcatgtcacacattgctgatctgctgtggccatcattaaagctctggtggtatttgtgatgaagagaaggagaaacacaggtagaaaaagaggggactatgctcccgctccaggcagggatagctcccagagctctgatatgcctctcccagattttaaagtgtgaagacacctgactggagtggactgagtgacaaccagtgtgttcaggtctctcctgtgacatccagagccctcagttctctttagacaacagtgtctgatgttctctgtgttcctgtgggctcaatgtgaagaactgtgtagcccagcctgccctgcacaccaggaccctgtccctgcattgcttgctcccttctacagtcagccttccaactccagccaaacactgggagacatctgcatcctgtgagctccacgctaccctaagctgcagctcctcacttccacactgagaataagaatctggatgtgaactttattgttcatatccttgatctgagggttgattgacaggtaaactaaagaattaagaatacttagagtttgtggagg

SEQ ID NO: 1814 - protein, 324 aa, Mus musculus
MGAMAPRTLLLLLAAALAPTQTQAGSHSMRYFETSVSRPGLGEPRFIIVGYVDDTQFVRFDSDAETPRMEPRAPWMEQEGPEYWERETQRAKGNEQSFHVSLRTLLGYYNQSESGSHTIQWMYGCKVGSDGRFLRGYLQYAYDGRDYIALNEDLKTWTAADVAAIITRRKWEQAGAAEYYRAYLEAECVEWLLRYLELGKETLLRTDPPKTHVTHHPGSEGDVTLRCWALGFYPADITLTWQLNGEELTQDMELVETRPAGDGTFQKWASVVVPLGKEQNYTCHVYHEGLPEPLTRWEPPPSTDSIMSHIADLLWPSLKLWWYL

SEQ ID NO: 1815 - DNA, 3499 bp, Mus musculus
agtctcggatcctgtgacacctcccagcagtcaggcacttgttgctcttgggacctgttgtcaatcccttagctcgcttttccttttagccccctgctggctcttggagtcctctctttccgcgtgacacctgggactctgatctctcaggcatcgctgtccttgcttggagaaattgatgagaaactggtagtcttaaaaaaagaaaacattaaacaccgtgcaaaagagaggcccccgctgtgagcaggagcctgaagtgctgcagaggtggcgcctctccggcccgggaccgtggtccggggcgccaacggcatgacggactcagcgacaactaatggggacgacagggaccccgagatcgagctcttcgtgaaggctgggatcgacggggaaagcattggcaactgtcccttctctcagcgtctcttcatgatcctctggctgaaaggagtcgtgttcaatgtcaccaccgtggatctgaaaagaaagccagccgatctacacaacctggctcctggcacgcacccgcccttcctgaccttcaatggggatgtgaagacagatgtcaacaagattgaagagttcctggaggagaccctaacccccgagaagtaccccaaactggctgcaaaacaccgggaatctaacaccgcgggcatcgacatcttctccaagttctcagcctacatcaaaaacaccaaacaacagaacaatgctgcccttgagagaggcttgacaaaggcgctgaggaagctggatgactacctaaacagccctctgccagaggagattgacaccaacacccacggggacgagaaggggtcccagcgcaagttcctggatggggatgagctgaccctggccgactgcaatctgctgcccaagctgcatgtggtcaagattgtggctaagaagtaccgaaactatgacatcccagctgagatgacaggcttgtggcgatacctcaagaatgcctatgcacgggacgagttcaccaacacctgtgcagctgacagtgagatcgagttggcctacgcagatgtcgccaggcgcctcagccgatcgtgagcttggctgtctggcccaatttctgctgcagaagaattctacttctcccaatggctttcagctctacagactcttcttccccattgccttggggaaacataaaaaaaaattaggccacatcttactggcacccctgaactcaactccagccttctaccttctaagatcagtgccatccttctgccttgccctgcaggagcctggcaagcagaggacacggtggcagattttttttccacctgctggtctgatctagggtcagtgtatctggggtcagtgaatctggggtcagtttgcagagctctcatgggattgtcaccgttcccttctgccaatatcataatgctttctcagatgcgctaacaacttgaaatgccagcttctctctcccctcgttcctcagcaaatgcaaggtgatggacagatacatcatcgtcagggagagatctatgccttgattggggagacagtggttggggggactcagctgggtgtggctctagcaaaacagttccagatgctcactatttctgacagtgggccagatggagacacccccaacacacaatataccccagttttctggtgcaatatgattacatcctggccagcactgacccaagttttcctcctgtctccattttgccacaaaggcagtcgatttataactctaaaccaaggtgacccagatagggagagacttctgggaagcaatattgatgccaaaaggcccaaacagggtctacagccacaggggtcactggctgaagagtagtcgtccactggagatcacatgagagtgtgtgtgtgtgtgtgtgtgtgtgtgtgtgtgtgtgtgtgtgtgtgtgactgtgttcttcagtgggtagctttgggtttgagcaagcgaaggaagtggagggatgggaggaaataaagttctatttgagtttgacatagcctagaaaacttttagagcagtcttctctctcattatctaaatcttggattggtgttacggcacccctaccaactgtagagcagactccaacatcagccaaaaatgtcttccaggctcttcatagtcacttgcagatgtgggttgccacctgcctgtgccctggctcccagtttcttcagcctcagcctctgatgaaagagaaagtctattaatgaatggtgtgatcgtgggctaccttaggaagaaagcccatgggtctttctgactgggaagccacaacttgaatttggaaattatggactgccttgggcttgggttcattttcctgtcagcaggctcatctatcagattttcaaggaagagaaaactttttaaaaatttctttataaactaatatttctctctttagtaattctccttgagttttacctacaactctcacagggtgtgaccatgagaacctaggctgattaggaactatgacaaatcaatcactcattagctcttcctctaccagtgagctagtgagtgcctagaagaaatccatcaccaggacctcaactccaacaatcccgcttctgtgtcactgacagtggaggcgaggctcctgagggccggtaaggccctggtcttggctcattgctcgggagggtggagcagcacagatcctttccatagaaatacaacatggtttaacccaagcagtcactgagccctcctgcctctagggatctccaaagcaaagagtgaccattgatccaaggagggaggaagcaggaggtctccctagcccactggggaagaggactctgcctgctagaagtttataaacctgaaggggctttgaagaggcaaaatgagccgattcatttccatcgctacaggaacctttccacgggctctccataagctacccctggggatgtttaaaagtgtagcactgctgagggaacagcacttttttcttcagggaagagccctcaatgggcctctcggggaagcagaacttccggaaccatccggaaggccgtttaattaaaagaaaaccatgctgttctccgggatccttcctagaatttacaagcaggcagggtgaactcacgcagctcacacccctattttccaaaggtgggctggtgttaaagatatgaagactagcgtgcatgctgaggggcctcagaggaaggggaagaattttcctcatgtgatgctctgagcccagcaatcggcatgtcttttaaaaacaaacttcccaagccgagtcgatgttgtttctagacggttctcctatggttgagttagtttcacatacatcacaatatttaggcaatgttggatgctataggatcaatcagaacccctttaaagagaggcacgattgtaaatgggaggctttcctcagtactttaatgcagatgtaactttaatgttatcaaataactataatgagactaaccaatgtcttaggacacaattatcatagtatgt

SEQ ID NO: 1816 - protein, 251 aa, Mus musculus
MTDSATTNGDDRDPEIELFVKAGIDGESIGNCPFSQRLFMILWLKGVVFNVTTVDLKRKPADLHNLAPGTHPPFLTFNGDVKTDVNKIEEFLEETLTPEKYPKLAAKHRESNTAGIDIFSKFSAYIKNTKQQNNAALERGLTKALRKLDDYLNSPLPEEIDTNTHGDEKGSQRKFLDGDELTLADCNLLPKLHVVKIVAKKYRNYDIPAEMTGLWRYLKNAYARDEFTNTCAADSEIELAYADVARRLSRS

SEQ ID NO: 1817 - DNA, 3253 bp, Mus musculus
atgttcagttggctgggtaacgatgatcgccgcaagaaggaccctgaggtcttccagacggtgagcgatggactcaaaaaactctacaagaccaagctgctgcctctggaagagtattaccgcttccacgagttccactcgcccgccctggaagatgctgatttcgacaacaagcccatggtcctgttggtgggccagtactctaccggcaagaccaccttcatcaggtacctgctggaacaggattttccaggcatgaggattgggcctgagccgaccactgattccttcatagcagtgatgcagggagatgtggaggggatcattcccgggaatgccttggtggtggatccaaagaaacccttcagaaagctcaacgcctttggcaacgccttcctgaacagacagtttccaagactgtgtgtgttatcttacattggacccttcactctacttccatgccccaaagctcctctcactgactgtcactccaccacagggtatgattttgctgcggtcctcgaatggtttgctgagcgggtggaccgaattatcctactcttcgacgcccacaagctggacatctccgatgagttctcagaagtcatcaaggctctcaagaaccatgaggacaagatgcgcgtagtgttgaacaaagctgaccagatcgagacccagcagctgatgcgagtatacggagccctcatgtggtccctggggaagatcgtgaacacccccgaggtgatccgggtctacattggctccttctggtcccacccactcctcattcccgacaaccggaagctctttgaagctgaagagcaagacttgttcagagacattcagagtctaccccgtaatgctgctcttcgaaagctcaacgatctcatcaagagagcccggctggccaaggtccacgcctacatcatcagctccttgaagaaggagatgccctcagtgtttgggaaggacaccaaaaagaaagaactggtgaacaacctggctgagatctatggccggattgagcgagaacaccagatctcccctggagacttccccaacctgaagaggatgcaggaccagctgcaggcccaggacttcagcaaattccagccactgaagagcaagctgctggaagtggttgatgatatgctggctcatgacattgcccagctcatggtgctggtgcgccaggaagagacccaacggcctgtccagatggtgaagggcggagcatttgagggaaccttacaaggccccttcgggcacggctatggagagggagctggggagggcatcgatgatgccgagtgggtggtggcgcgggacaagcctatgtatgatgagatcttctacaccttatccccagtggatggcaagatcacaggtgccaacgccaagaaggagatggtgcgctccaagttgcccaacagcgtgctgggcaagatctggaagctagccgacattgacaaggatggcatgttggatgacgaggagtttgccctggccaaccaccttatcaaagtcaagctagaggggcatgagctgcccagtgagctacctgcccacctcctccctccatctaagaggaaagtatcagaatgagagagccaggtaacctcagacagacagtatcaaaagagaggatagacatgtagaccacacacacacacacacacacacacacacacacacacacacacaacttgacagtcacactataaatgagaagggttcacctttgtctgagcacctctccaagttcccagggttggtagaagggcagctttccctcctctgtcttaggatataggcctgtgtccaaacattccctccatcttccattcccccacagacatgaggcagttaacacagatggcccacccactctacccccagtgcctccacatctaggctccgagcagatggaaaaggctttttcatggaatagaaaatttgctttattttctatgcttttattttttttccctctggggcttcctaagtagaaattgactcagggcctgggagctgtgagggaaaggagaagctgaaagaggaggaccaatctgagaaacctccatagggcactgcaccccacacttgaaaagacactggcctatgttctctgtgtttttctcaacccaagactctctgtcttcctcagtaaacatggaccttgaattctgcctgccactttgggtcaaagactcacaaacaggaaaagaaaaaagaaaaatttggtaggaaagcacaaggaagataccctgtggtcttcttcaacaggacattggattggtggttcatgggtttgtcccccacccccagcgtggtatctctggatactcagtttctttatacataccaagccattcctgtgtggcaagagcagggttaggcactttctatgtattagtccctgtggccttcatgaatgccctaggcaagtttgcttccctcctgttactgcatttttcaggtgaagagccaaagactcagagtagtttagggtaccttcccaaactccgggaagtcccaagaagagaagattcaaatccagaacttgagacacccctctgtcccagttctgtgatggatgaaagatcccagtgttgctacgtggtgacaaagcacaggacagtctgaacacacagcccctcacacagccttccaaagcatccaggcaagggagggagggaggttcaccagcctttgatgggccaacaatctgaccatctgtcaccttgtagaagcaaactgtgccttctggcctgcgcctcgtgttcacaacatcacagaagaccagccaagccatcaggagagtgggctggactgctagatgttgtctgtgcctattcctgctcagcctcccgttcattagcctaaagcatcccagctcaaattcagccccaggcttttacaaagcaggacttcatgctaattcacagaaggccatcttgaaaggactgggaccttgttctctagagttccaaggactctggtgtccttggcaaaatttccatcattctcagtgccctctatctcctctgtggtctccccctggcttgccctatgcccactgttgcagtagctctctgctacactcctactgtgatggaaaacaaagcaagtataacttattttgtatctatgttcagactatatcgactgttctgtgtatcttcaatgtgcttataactgcagtgtgtttgtcattaggattcatgttaatacaacatatttaccctttggt

SEQ ID NO: 1818 - protein, 534 aa, Mus musculus
MFSWLGNDDRRKKDPEVFQTVSDGLKKLYKTKLLPLEEYYRFHEFHSPALEDADFDNKPMVLLVGQYSTGKTTFIRYLLEQDFPGMRIGPEPTTDSFIAVMQGDVEGIIPGNALVVDPKKPFRKLNAFGNAFLNRQFPRLCVLSYIGPFTLLPCPKAPLTDCHSTTGYDFAAVLEWFAERVDRIILLFDAHKLDISDEFSEVIKALKNHEDKMRVVLNKADQIETQQLMRVYGALMWSLGKIVNTPEVIRVYIGSFWSHPLLIPDNRKLFEAEEQDLFRDIQSLPRNAALRKLNDLIKRARLAKVHAYIISSLKKEMPSVFGKDTKKKELVNNLAEIYGRIEREHQISPGDFPNLKRMQDQLQAQDFSKFQPLKSKLLEVVDDMLAHDIAQLMVLVRQEETQRPVQMVKGGAFEGTLQGPFGHGYGEGAGEGIDDAEWVVARDKPMYDEIFYTLSPVDGKITGANAKKEMVRSKLPNSVLGKIWKLADIDKDGMLDDEEFALANHLIKVKLEGHELPSELPAHLLPPSKRKVSE

SEQ ID NO: 1819 - DNA, 4541 bp, Mus musculus
atggaggggtactcagaggaagccagtctgctgcggcatctggagaaggttgccagtgaggaagaggaagtgccattggtagtttatttaaaggagaatgcagccctgctgacagccaatgggctacacctgtcgcagagccgagagacccagcagtcctcaccaaaccctcccgacactgaagtacccagtccagctgcagatatcaaccagaacccgtcctcacctaatgccacactcaccacactagcctctagcagtcaccacagtcagcccaccgctgatatcaaccaaaaccctccagccgccatcacccctgtcccacagaattcatcccaggcacagtgctccccgaatggcacacttgattccaaacccggcactctgtgtgctgatgatgggcagtccccggtgccggcagaggaggtgagatccagcattctcttgattgacaaggtgtcagctccaccttctgccgccagcaccttctctagagaagccacgcccctctccagctctgggccgccagcggcagatctcatgtccagctccctgctcattgacatgcagcctagcaccctagtggcaccagcagaacaagaggtgcctggccatgtagctgtcaccacgcccactaaggtgtatagtgaagtacatctcacactagccaagcctgcatccgtggtcaacaggaccgccaggccttttgggatccagtcgccagggaccagccagatagagcaaagccccatgatgggaagacgacagtttggagagaaggcctgggctcctcctgctagcagtatggcggataggagtccccagccacagaggcacataatgtcccgcagtcccatggtggaaaggagactgcttgggcagcgaagcccggtcctagagagacgccccttaggaaatttcaccccaccccccacctatgcggagactttgtcaacagcccctgtggcttctcgggttaggtctcccccctcttactccactctgtatcccagctctgaccccaagccttcccatttgaaaggtcaggtagcccctgccaacaagacaggaattttggaagaatctatggcacgccgaggcagccggaaatcaatgttcactttcgtggagaagcccaaggtgaccccgaatccagatttgctggacctagtgcagacagctgatgagaagcggaggcagagagaccacggggaggtgggcatggaagaagagccctttgccctgggagctgaggcctccaacttccagcaggagccaatagctcgggacagggccagccctgcggcagctgaggaagctgtccctgagtgggcctcttgcctcaagtcaccccgtatccaggccaagccgaagcccaaacccaatcagaacctctcggaagcctcagggaagggggctgagctctatgcccgccgccagtcacggatggagaaatacgtcatagagtcttcaggccatgccgaattggcccgctgcccttcacctaccatgtccctgccttcatcctggaagtacaccactaacgcccctgggggcttccgagtggcatccttaagtccagcgcggaccccgcctgcctctctctaccacggctatctgccagagaatggagtcctgcgccctgaacctaccaagcagcagccataccagatgcggccttccctctatgctctgtcgcccgtcaaggaacctgccaaggcctcatcgcgtgccacctcatcgcgcactccatcacgcactgtctcacctcgagctgcctccccggccaagcctagctctctggacctggtgcccaacctgcccagagcaggcctcccaccatctcctgctctgcctcggccttcccgctcctccccaggcctctacactgccccagtccaagacagcctccagcccactgccgtgagtcccacttacagcagtgatatctcccccgtgtctccctccagggcgtggtctcctcgagccaagcaggctcccaggccttccttctccacccggaatgctgggatcgaggcccaggaccgcccggagagcctgcccacgtccccgccctggacgccggccgcttcccggcctcctagcagcctggacggctgggtgagcccggggccgtgggagccgggccgcgggagcagcatgagcagccctccgccgctgccgccgcctccaccaatgtccccctcgtggagcgagcgctccgtctccccgctgcgatcggagaccgaggcgcggcccccgagccgccagctgcaggcgcttctggcgcgcaacatcatcaacgcggcccggcgcaagagcgcctccccgcggccagcgccggctgagaccctgcggcccttttccccgccgcaggggccgccgccgccgccggcgcgcatgcgctctccgcagccagccagccctgcccgtaacttccgtggagctgctttctctcccatcccgcggagcccgttgcccatcggaccttcttcctgtgctagtccccggagtcctcaagccgcgccgtccaggccttttccctaccgccgctcacccacagactccgacgtgtctctcgactccgaggattctgggcttaagtcgcctggcatcctcggctacaacatctgtcctcggggctggaatggcagcctgaggctcaagcgtggtagtctccccaccgaggcctcctgcaccacctaaagtttcatctctgccccgggagggtcgagccggaagaggcactaagcttgggggaaccccagcaccgagatccgaagggtctgacctcattggacagctctagagaaaaaaggggtcagggaaggagagctctgggcttggggggcctgtccatcaaacttgggttgtagcccttggttttgccatttatttgtatggctctgaggaagagcctcttgtctttgacccttagctttggccaatgcagtctccagacatcttccctttccttccattcacgtgtgccttaggggaggcagctaagcacacagccatcgaccttcatcattgccaggcttccatgcttcttcctccaacactgctttctacagcctggcaaatgaagtatgtgttgaaaagaaccttggccatgacctgggcccgggccctggcttgaccgtcgctcctggcatcaagtcccaggcgggagcagctgttttccatctcttcgcagactagctctatttttatctggtgacctttaaagagatctcccaggcaagctcaaggtgccctgctgggcccctctggggagaaggggctggaagattctctccaggcactgccatgctgctttctctatcccccccagctcagggtgtctagactatccctatggccagggcagagcagagagtaaagttccctggggctatgggtctcaggagccccagactcctgtttttctgggcttattgatggctagttttaggtttttcaaaaccggggagagacgagaaggcagtctagggtgtgttacctatttggaaaggggttcttgttgcagaatatgcaaaccatggccaggatacgtagacaagacttaagtattgggtggagctgactcttgacctctgaggattcttgaaattcactccatagtatcagaaatcgaggggttaagggggagcttcacagggctcgaattccgatgcaaataaacctgggtgggaagtcaagtatgccagtatgggcttgccatagtgtctatagtatgcccagaagggtgggcattgttatattcattttcttcacatctcactgtggcctggatcatgcctatacccagtggccttaaggtgcctctccccttaatctcagtgactctgattccagtccccaagagtgactgggggaagaagagctgagttttgtgtgtttcatagtcaacaggtgatatcccttgaaggttcagagtatcatcttcagaattcagagcctggggctgggggtgctggagttagatgaggcacaaatatatgacggtgggggaaaatactaggatgttgttaaaggtaagggatgatgcgattttggagtgattagtagatttgcccacatatcagggttatctagagctcctgagtaaggttaggggaagctagggtcaggatggaataaagtcagggttggaatggagtgcatcggaatagaggggtgatcttggtaggttcctattgcccatgggtttgagaaccaggccctgggaagatgagagagtactcagctcctacctggtgcagcatcccttgtagttacagagtcccaagctagggaagcctcccagagaagagaccctactagaattctagctcatgctttggcatacatagatcagcttctacctgcaattcctgggataaccaggagggggcagctttgagaagctacagttctgttcccgcagttgtcatagtgactgccttctcacttagctggtctctaaaacccaccacagcttgcctgtatcctgccttgtgcctcttgtagaattcagagcaataaatgcgttctgc

SEQ ID NO: 1820 - protein, 901 aa, Mus musculus
MEGYSEEASLLRHLEKVASEEEEVPLVVYLKENAALLTANGLHLSQSRETQQSSPNPPDTEVPSPAADINQNPSSPNATLTTLASSSHHSQPTADINQNPPAAITPVPQNSSQAQCSPNGTLDSKPGTLCADDGQSPVPAEEVRSSILLIDKVSAPPSAASTFSREATPLSSSGPPAADLMSSSLLIDMQPSTLVAPAEQEVPGHVAVTTPTKVYSEVHLTLAKPASVVNRTARPFGIQSPGTSQIEQSPMMGRRQFGEKAWAPPASSMADRSPQPQRHIMSRSPMVERRLLGQRSPVLERRPLGNFTPPPTYAETLSTAPVASRVRSPPSYSTLYPSSDPKPSHLKGQVAPANKTGILEESMARRGSRKSMFTFVEKPKVTPNPDLLDLVQTADEKRRQRDHGEVGMEEEPFALGAEASNFQQEPIARDRASPAAAEEAVPEWASCLKSPRIQAKPKPKPNQNLSEASGKGAELYARRQSRMEKYVIESSGHAELARCPSPTMSLPSSWKYTTNAPGGFRVASLSPARTPPASLYHGYLPENGVLRPEPTKQQPYQMRPSLYALSPVKEPAKASSRATSSRTPSRTVSPRAASPAKPSSLDLVPNLPRAGLPPSPALPRPSRSSPGLYTAPVQDSLQPTAVSPTYSSDISPVSPSRAWSPRAKQAPRPSFSTRNAGIEAQDRPESLPTSPPWTPAASRPPSSLDGWVSPGPWEPGRGSSMSSPPPLPPPPPMSPSWSERSVSPLRSETEARPPSRQLQALLARNIINAARRKSASPRPAPAETLRPFSPPQGPPPPPARMRSPQPASPARNFRGAAFSPIPRSPLPIGPSSCASPRSPQAAPSRPFPYRRSPTDSDVSLDSEDSGLKSPGILGYNICPRGWNGSLRLKRGSLPTEASCTT

SEQ ID NO: 1821 - DNA, 4661 bp, Mus musculus
atgctgggtgctcacttcccacccccgccccttggagccagcgagggaagggctgccccttgcaccttccagatccctgatgggagctacaggtgcctggctctggaagctgaggagagcagtagtgaagacggcttgcagggagaggtgaggctggtggacctggaagaagaggggaccagccaaagcagagccaaccatgggacaccaccattatccagagccccggccataatccagccatccagctgtcacagggaggcacgaggtggtttccagcgcagtgacaggccaagccatgactgggatgtggtacaggcccggaaagtgatgacagccagtggcagcagcagccctgtgcccagggtggcccagaaaccagcactgggccggagcacaagcttcaccgaaaacgacctgaaggaggccaaggcgaggagccagcagattgcagcccagctgaccacccctcccagctccaattcccgaggggtccagctcttcaacaggcgcaggcagagggtgaacgagttcaccttggagagccgaggccagaggtcaccaaagctcaaccaagaggccctccaaacagggcgtcctttgagccccataggccatgccccggggcctagtgtgaagcccacatctccatcaaagccaggctctccaaagcaccccagtccccaaagccccagccgaggggtcgctggccacatcatggaggggtactcagaggaagccagtctgctgcggcatctggagaaggttgccagtgaggaagaggaagtgccattggtagtttatttaaaggagaatgcagccctgctgacagccaatgggctacacctgtcgcagagccgagagacccagcagtcctcaccaaaccctcccgacactgaagtacccagtccagctgcagatatcaaccagaacccgtcctcacctaatgccacactcaccacactagcctctagcagtcaccacagtcagcccaccgctgatatcaaccaaaaccctccagccgccatcacccctgtcccacagaattcatcccaggcacagtgctccccgaatggcacacttgattccaaacccggcactctgtgtgctgatgatgggcagtccccggtgccggcagaggaggtgagatccagcattctcttgattgacaaggtgtcagctccaccttctgccgccagcaccttctctagagaagccacgcccctctccagctctgggccgccagcggcagatctcatgtccagctccctgctcattgacatgcagcctagcaccctagtggcaccagcagaacaagaggtgcctggccatgtagctgtcaccacgcccactaaggtgtatagtgaagtacatctcacactagccaagcctgcatccgtggtcaacaggaccgccaggccttttgggatccagtcgccagggaccagccagatagagcaaagccccatgatgggaagacgacagtttggagagaaggcctgggctcctcctgctagcagtatggcggataggagtccccagccacagaggcacataatgtcccgcagtcccatggtggaaaggagactgcttgggcagcgaagcccggtcctagagagacgccccttaggaaatttcaccccaccccccacctatgcggagactttgtcaacagcccctgtggcttctcgggttaggtctcccccctcttactccactctgtatcccagctctgaccccaagccttcccatttgaaaggtcaggtagcccctgccaacaagacaggaattttggaagaatctatggcacgccgaggcagccggaaatcaatgttcactttcgtggagaagcccaaggtgaccccgaatccagatttgctggacctagtgcagacagctgatgagaagcggaggcagagagaccacggggaggtgggcatggaagaagagccctttgccctgggagctgaggcctccaacttccagcaggagccaatagctcgggacagggccagccctgcggcagctgaggaagctgtccctgagtgggcctcttgcctcaagtcaccccgtatccaggccaagccgaagcccaaacccaatcagaacctctcggaagcctcagggaagggggctgagctctatgcccgccgccagtcacggatggagaaatacgtcatagagtcttcaggccatgccgaattggcccgctgcccttcacctaccatgtccctgccttcatcctggaagtacaccactaacgcccctgggggcttccgagtggcatccttaagtccagcgcggaccccgcctgcctctctctaccacggctatctgccagagaatggagtcctgcgccctgaacctaccaagcagcagccataccagatgcggccttccctctatgctctgtcgcccgtcaaggaacctgccaaggcctcatcgcgtgccacctcatcgcgcactccatcacgcactgtctcacctcgagctgcctccccggccaagcctagctctctggacctggtgcccaacctgcccagagcaggcctcccaccatctcctgctctgcctcggccttcccgctcctccccaggcctctacactgccccagtccaagacagcctccagcccactgccgtgagtcccacttacagcagtgatatctcccccgtgtctccctccagggcgtggtctcctcgagccaagcaggctcccaggccttccttctccacccggaatgctgggatcgaggcccaggtgtggaagccctccttctgcttcaagtaacacatctcagggcctgtcttgtccccttctcggagggccagagaaaagatgtgggaaggatatagctcggggcttagtgaggaagatggacacccatggttcaaagtctggtgttgaccctagatagctatgtgactgtgggtggaccatctcccctctccgagctgtagacaaaggagcttagacgccacatcagggtaatgagggggatcacggagaatcaaaaccctcagagggtcctgatgagcagagagtctttccctggcctttcgagcttcagagatgggagtctgatggcagtgtcctgcttggagaaggcccaggggtgtcctcatggggacttctggaacagacagccttctgacccctgtgcgtctgccacgtgctgggtgtgccttactcatagggctcaggctcctggcctctggcttcctgcttctggattctcaccttcacagggagtttcttcccgcctcggccttctggacatgtcctctgtcctgcctcagagagctttgcctggctccacctcctctcctgagtcctctgctgcctgtggacttggcacaccactcctttctgatgcttgtcctcctgctttctgagactctgctgcctccatgtcctctctgggacctgactctccacagggagggagactccttgtcccagacctcagtcctgcttccaactgccttccttgccctcactgttctggggtgggggacatccccggggatccctgagaagagtgtcctttagaaagctaggcagatgtggattgctgctaggagagtgaccctttagtggcatagtgacctcagacaagaactccctggttgaaagaagccacctcgatgcaaaggctcaaggtccagggagagacaacagaggagtgtccaagacttgcccacacctcctcccatttgctgggggagctttggccaattcactcctttctaggtcttagttttcccatgtacacagggtcctctagttgtgaaaatcactcaagattgagagaacaggctggcatagtgggataaagggcccaaaagcaaggagactgtcgtatagaaagaaagtggacaggatgctactgagggacagagaagttagcttttcttgagagcggcctggggtggttgggttggaagaagctgctgcagcggctatagtcagaagccccggttgggccagcttaagcttgggacccgctggtgacagtggctcagaagagggacagaaaagccttggacttagatctgggttctaacagactgaatgtgcaccttgggtctcagactcagtttccccgttcatacatacagggagtatgaagtcaggtagcctaagatctcccactccctgcctccctttgacgtggtacagccacccccacccaccccgcccccgaactagcctttttgggggagtgagaatacagatacaagaagacagacacatttagatggaatcttaccacgacttgaggctaggaccacccacttcctctttcccagccctatttctgggatcccagaggggcaggggtggtggaggcggtgccgggacttggctgagtgcagtttgagctctaggcttgtctccatgggaacaggaggggtgccttgtcagcaagctcatccgcacagaagagggaagagggagatgcgtggggaaactgagtgagtcggattcctccaggccaggtcttcccagaacagagtcagcctctagtagaccctgctcttttgcccctggggcggggagggttggcagtggtggggcccatcctctatcctgtagctcctgccgctgcgaggctgaactctttggtcctgcctcccgttctcaatacactctgtctc

SEQ ID NO: 1822 - protein, 929 aa, Mus musculus
MLGAHFPPPPLGASEGRAAPCTFQIPDGSYRCLALEAEESSSEDGLQGEVRLVDLEEEGTSQSRANHGTPPLSRAPAIIQPSSCHREARGGFQRSDRPSHDWDVVQARKVMTASGSSSPVPRVAQKPALGRSTSFTENDLKEAKARSQQIAAQLTTPPSSNSRGVQLFNRRRQRVNEFTLESRGQRSPKLNQEALQTGRPLSPIGHAPGPSVKPTSPSKPGSPKHPSPQSPSRGVAGHIMEGYSEEASLLRHLEKVASEEEEVPLVVYLKENAALLTANGLHLSQSRETQQSSPNPPDTEVPSPAADINQNPSSPNATLTTLASSSHHSQPTADINQNPPAAITPVPQNSSQAQCSPNGTLDSKPGTLCADDGQSPVPAEEVRSSILLIDKVSAPPSAASTFSREATPLSSSGPPAADLMSSSLLIDMQPSTLVAPAEQEVPGHVAVTTPTKVYSEVHLTLAKPASVVNRTARPFGIQSPGTSQIEQSPMMGRRQFGEKAWAPPASSMADRSPQPQRHIMSRSPMVERRLLGQRSPVLERRPLGNFTPPPTYAETLSTAPVASRVRSPPSYSTLYPSSDPKPSHLKGQVAPANKTGILEESMARRGSRKSMFTFVEKPKVTPNPDLLDLVQTADEKRRQRDHGEVGMEEEPFALGAEASNFQQEPIARDRASPAAAEEAVPEWASCLKSPRIQAKPKPKPNQNLSEASGKGAELYARRQSRMEKYVIESSGHAELARCPSPTMSLPSSWKYTTNAPGGFRVASLSPARTPPASLYHGYLPENGVLRPEPTKQQPYQMRPSLYALSPVKEPAKASSRATSSRTPSRTVSPRAASPAKPSSLDLVPNLPRAGLPPSPALPRPSRSSPGLYTAPVQDSLQPTAVSPTYSSDISPVSPSRAWSPRAKQAPRPSFSTRNAGIEAQVWKPSFCFK

SEQ ID NO: 1823 - DNA, 5782 bp, Mus musculus
gcacagggcgagaggactgtcactgtggacgctcctagctcaccgacccgggacaccggcctctggggagcgtcaggccttctcctctgggctccacggctcccgatcccgggtgaacagcgttcgggaaggagggcgatgtctgcgggaacccactgtggtcccccggggaaccgggcacctccgttcgcgcgtctctgttgcgtctcggccgcgctggggatgctgtggtcccctgcgtgtctggcgttcaacttggatgtggacaagctcactgtgtacagtggccccgagggcagctacttcggctactcactggacttctacatacctgatgcgcgcacagccagtgtcttagtgggggcacccaaagccaacactagccagccggatatcgtagaagggggagctgtctactactgtccctggccctcagagaggtctgcacagtgcaagcagataccgtttgacaccaccaacaacaggaaaatcagagttaatggaaccaaagaacctatagaatttaaatcaaaccagtggtttggagccacagtgagagctcacaaaggaaaagttgtggcttgtgcccctttgtatcactggagaactctgaaacctaatccagcgaaggacccagttggcacatgctatgtagcaattcagaatttcagtgcctatgctgagcactcaccttgtcgaaacagcaatgctgatcccgaaggccaaggttactgccaggcagggtttagcctagacttctataagaatggagaccttatagtgggaggacctggaagtttttactggcaaggtcaggtgatcactgtcagtatagcagacatcattgcaaattactcattcaaggatattctacgaaaattggccgcagaaaagcagacagacgtggctccagcttcctatgatgacagctaccttggatattcggtcgctgctggagaattcactggggactctcagcaagaattggtggctgggattccaagaggagcacagaactttggatatgtctccatcattaactccacagacatgaccttcattcagaattttactggtgagcagatggcatcttatttcggatatactgttgtggtatcagatgttaacaatgatggcatggatgacatattggtcggggcacctctctttatggagcgagaatttgaaagtaaccctagagaagtgggacaggtctacttgtaccttcaagcaagcgccctcctcttccaagacccacaggtcctcaccggcacggagacatttgggagatttggtagctctgtggcccacttgggggacctgaaccaagatggatacaatgacatcgccatcggtgtgccctttgcaggcaaggatcaacgaggtaaagtcctcatttacaatggaaacccaagaggtttacacagcaagccttcccaagttctgcaaggaatatgggggtcacagaccatcccttctggatttggcttttctctaagaggagatgcagacatagacaagaatgattacccagatttgcttgtaggggcatttggaaaagggaaagtagctgtttacagagcaaggccagttgtaaccgtggatgcccagcttctgctgcacccgatgattatcaaccttgaaaataaaacttgccagattccagaattccctactcctgtggcctgcttttctgtaagagtctgtgcatctatagcaggccagagcatttcaaatacaatagccctgctggccgaggtgcagttagatttcctgaagcaaaaaggagccatcaaacggacgctctttctccacaaccaccagtcccatttcaccttcccctttgtgatgaagcagcagaaatccctccactgccaggattttatggtttaccttcgggatgaaactgaattccgagataaattgtctccaatcaacatcagcctgaactacagtttggatgattctacctttaaagacagcctggaagtgaagccaattttgaaccactacagggacaatgtagttactgagcaggctcacatcctggtggactgtggagaagacaatctatgcgttcctgacttgaagctgtcagctagaccagataagcatcagataattattggcgatgaaaatcacctaatgctcataataaatgcaagaaatgagggagaaggggcctacgaagccgaactctttgttatcatccccgaagaagcagattatgttgggattgagcgcaacaacaagggactgaggcccctgagttgtgagtacaagatggaaaacgtgaccaggatggtggtgtgtgaccttgggaacccgatggtgactggaacaaatttttctctgggcctccgatttgctgttcctcgccttgagaaaacaaatatgagcattaacttcgatctccaaatcagaagctccaataaggacaatcctgacagcaacttcgagcgtgtacagatcaacatcactgccattgctcaggtcgaaatcagaggagtgtcccaccctccgcagattgttctgcccatccacaactgggaaccagaaaagaagccacacaaagaggaggaagtcggtcctttggttgagcatatttatgagctgcacaatattggacccagcaccatcagtgacagcattcttgacgtgggctggccgttctctgcacgggatgagtttctcctctatatttttcatcttcaaactctgggacctctacaatgtcaaacaaatcctgagatcaacccacaggatataaagcctgctgcctccccagaggatacccctgagctcagtgccttcttaagaaatgctacaattccccatcttgtcagaaagagggatgtgccagtggtccagctccacagacagagccctgcaagaatactgaactgtaccaacattgactgcttgcaaatctcttgtgcagtgggtcgcctgggaggaggcgaaagtgcagtcctaaaggtcagatcgagattgtgggcccacacgttcctcaagagaaagaatgatcattatgctcttgcatccctggtgtcctttgaagtcaagaagatgccgtataaagaacagccagcaaagctgccagcggggagcacagcggttaagacgtcggttatttgggccactccgaatgtctccttctcaattccattgtgggtcataatactagcgatccttcttggtttgctggttctggctatcttaactttagctttatggaagtgtggattctttgatagagcaagacctcctcaggatgaaatgacagacagggaacaactgaccagtgacaagaccccagaggcgtgacttggaaacatgaagacctaaaattcaagcactggtcctattcaaagaaagaaagggaggaaggacacaagggctcaatgatcatagccttccatacctgccaatgacccagggaatgaagagtccctaatgatcacctcatctaagtcatgcattggtgtggagtgcagagaaccccacgtgaaaagaaatgcagccactaacactacagaaacaatccacagccatgaagatttcctttgttcttaccgtttcacatctggctgacattctggaacagctgtaggagcttaggcagctgtctaggtcagcccaatatgacttacaaaaacaattcctacagagatgagatgaactgagattgaacactactgtaatccgatggaatctcagacacctccctatggaatagaaccctttctaaggatgcgaaggctcagggagaaaagtgatatgatgttgggactatgaaagtgcttatggaactacagagatgatttcatcatgggaagaccaaaaatatatttatttatgtttcctttctctaggtagagaattgggccatttagaggatgtggaaattaagatttggttagctagatttcatcactactcagtttacttcctcttaagataactactctgtgcagatagcatatttaattgggcttcttcaggtgttagatggtgttacacatggtttggcattagggctctgttgtgcttaattttctgctgcctcgagtgacttttcttcatgttctctggaaactcatgtctgcataattcaactttacaaaatcttatatttatagtttcttttatatgtgtaaaaaactatttccagtgacttctgtaaagcattcatttcaaggtactcactatgctgatgatgttgaaaagtacttgcacaattttgtagagtccatataaaaagcaatttaactatatgggtgaatattatcttaatagctatagtaagcaccaatatttaccttgaaatttacacactcattttcattgtaatacctcacatttatataaaagagaaaactgtgttgaacataaataagatgaagatatataaagttatacaagtgtgagccaaacagaaactcactcttaaggacatagcagtgcttattacagctttattgtccactctttatggttaacttttcctagcaagtaatcttggagaatattttatatttaagctattttaccatcatctttacctaaacattgcttagagctcttgtaaataatccataataatttgtaatgttgtcattttgaagtaatattgaccagccaaattaataagattgtctgcacaattttatatcctttttataataatgaaaaattgctatggagaaatgctgaacaaaatgttatgtgcaatattttatagacctatgtatctgaggcatgtttacactggcattagtttcttttttttaattaatatcctgatcactaagtctgatataacaagctgaccaaaatcctaacgtttacaaaacagaaaactctgtctcagtttcaacaatgacactttatttgaaagatgacccaaactcacagacagtaaattttatgtggtgccttaacctggaaaggagccatttggcttcagttgctacagttccttggaaagcaaatgaaatgcacagagtcaaacagcattgctgttcatcttgccctgcttattagttaaatctgtcctggtagctggcttatgtctataagggctagtgtctaggagtacgacacttgcctcaaagagtcacacaccagcctctggggttgtctttactgttagtctttttggtgggacaactcactctacattttaatttttatgattcctgatgtggatccattacaaacttctcagaagtttggagtgcatctctgatcttgaaagaactcagagaactcttagggtgaaatgggaactgtgggagacaacccatatggggaaaactaaagatgtcaggggggcgacaagaccaacacagaagaaggtatgggaatatcagaggcaaaacatggtttcccatggtctcaactgtagaagtgcaggagggctatcatacacatgcacacagaagctgaggtcaggtgacccctctggggacatgttcataggcatcccatcctcacagagaactgagtattcaacaatgctcatggcattgctgatgcttctgtcatacattggtattctcgaggagtctatctgtatttctctttaatgagttctttcctagttctcacagctgtttttataagacagagggaaatgagcagattttctaatcttggagatttttatacagtaaagcattctagttgtcactgaaatctaaatcttagaattcttgtcttatttaaatacatgtatagagacagtgtagattttcatgtacctatttacattgtcacc

SEQ ID NO: 1824 - protein, 1062 aa, Mus musculus
MSAGTHCGPPGNRAPPFARLCCVSAALGMLWSPACLAFNLDVDKLTVYSGPEGSYFGYSLDFYIPDARTASVLVGAPKANTSQPDIVEGGAVYYCPWPSERSAQCKQIPFDTTNNRKIRVNGTKEPIEFKSNQWFGATVRAHKGKVVACAPLYHWRTLKPNPAKDPVGTCYVAIQNFSAYAEHSPCRNSNADPEGQGYCQAGFSLDFYKNGDLIVGGPGSFYWQGQVITVSIADIIANYSFKDILRKLAAEKQTDVAPASYDDSYLGYSVAAGEFTGDSQQELVAGIPRGAQNFGYVSIINSTDMTFIQNFTGEQMASYFGYTVVVSDVNNDGMDDILVGAPLFMEREFESNPREVGQVYLYLQASALLFQDPQVLTGTETFGRFGSSVAHLGDLNQDGYNDIAIGVPFAGKDQRGKVLIYNGNPRGLHSKPSQVLQGIWGSQTIPSGFGFSLRGDADIDKNDYPDLLVGAFGKGKVAVYRARPVVTVDAQLLLHPMIINLENKTCQIPEFPTPVACFSVRVCASIAGQSISNTIALLAEVQLDFLKQKGAIKRTLFLHNHQSHFTFPFVMKQQKSLHCQDFMVYLRDETEFRDKLSPINISLNYSLDDSTFKDSLEVKPILNHYRDNVVTEQAHILVDCGEDNLCVPDLKLSARPDKHQIIIGDENHLMLIINARNEGEGAYEAELFVIIPEEADYVGIERNNKGLRPLSCEYKMENVTRMVVCDLGNPMVTGTNFSLGLRFAVPRLEKTNMSINFDLQIRSSNKDNPDSNFERVQINITAIAQVEIRGVSHPPQIVLPIHNWEPEKKPHKEEEVGPLVEHIYELHNIGPSTISDSILDVGWPFSARDEFLLYIFHLQTLGPLQCQTNPEINPQDIKPAASPEDTPELSAFLRNATIPHLVRKRDVPVVQLHRQSPARILNCTNIDCLQISCAVGRLGGGESAVLKVRSRLWAHTFLKRKNDHYALASLVSFEVKKMPYKEQPAKLPAGSTAVKTSVIWATPNVSFSIPLWVIILAILLGLLVLAILTLALWKCGFFDRARPPQDEMTDREQLTSDKTPEA

SEQ ID NO: 1825 - DNA, 3090 bp, Mus musculus
tgtgtgaatggagcggccgagcatcctggctcctcctccttccctgctgccggcccctcttatttgagctttgggaagctgggggcagccaggcagctggggtaaggagttcaaggcagcgcccacacccggggctctccgcaacccgaccgcctgcctgctccccctttccttttcccgccctccctcccacccactcattcacccacccacccagagagaggacggcagcccaggaacccgggcccgccgcctcctcgccgcgatcctggacttcctcctgtcgcaggagccggcttccacgtgtgtcccggagccggcgtctcagcacacgctccgccgggagcccgggtgcgtccagcagccggagcaacctggggaccgaggcccccggagcgcctgggccaagtccagcgccgagaatccgcaggatcgcaggagcggagaaccgtccgcatccgagccgcacctcatgggttccgacgtgcgggacctgaacgcgctgctgcccgctgtgtcttcgctgggcggcggcggcggcggctgcgggctccctgtgagcggcgcagcgcagtgggcgcccgtgttggacttcgcgcctccgggcgcctcggcttacgggtcgctgggcggtcccgcgcctcctcccgctccgccgccgcctccgccgccaccccactccttcatcaaacaggagcccagctggggcggcgccgagccacacgaggagcagtgcctgagcgccttcaccttgcacttctcgggccagttcaccggtacagccggggcctgtcgctacggacccttcggtcctcccccgcccagccaggcgtcctcgggccaggccaggatgttccccaatgcgccctacctgcccagctgcctggagagccagcctaccatccgcaaccaaggatacagcacggtcactttcgacggggcgcccagctatggccacacgccctcgcatcacgcggcgcagttccccaaccattccttcaaacacgaggaccccatgggccagcagggctcgctgggcgagcagcagtactccgtgccacctccggtgtatggctgccacacccctactgacagttgcacaggcagccaggccctgctcctgaggacgccctacagcagtgacaatttataccaaatgacctcccagcttgaatgcatgacctggaatcagatgaacctaggagctaccttaaagggaatggctgctgggagctccagctcagtgaaatggacagaagggcagagcaaccacggcacagggtatgagagtgagaaccacacggcccccatcctctgtggtgcccagtacagaatacacacccacggggtcttccgaggcattcaggatgtgcggcgtgtatctggagtggccccaactcttgtccggtcagcatctgaaaccagtgagaaacgtcctttcatgtgtgcatacccaggctgcaataagagatattttaagctgtcccacttacagatgcatagccggaagcacactggtgagaaaccataccagtgtgacttcaaggactgcgagagaaggttttctcgctcagaccagctcaaaagacaccaaaggagacacacaggtgtgaaaccattccagtgtaaaacttgtcagcgaaagttttcccggtccgaccatctgaagacccacaccaggactcatacaggtaaaacaagtgaaaagcccttcagctgtcggtggcacagttgtcagaaaaagtttgcgcgctcagacgaattggtccgccatcacaacatgcatcagagaaacatgaccaaactccagctggcgctttgaggggtccgacacggagacagtccagcatcccaggcaggaaagtgtgcaaactgcttccaaatctgattttgaaattcctcccactcacctttcaaaggacacgactgtggatctacatccgacttccaagacagcacacctgattgactgcatcctatcaggtttgccggaaggagtcggtgctccgcccacttttgattaactcacaggcctgaaaaaagtggttcacggtgtctagaaagtccattgctattgtctgaattttctactgttagaagaaccattgttgataatgccccccgcccccccccccgggtttcctcttctcctttgtgatcatttccccaggattagagagactgttacattttctttcatgggatatttataggccagggcatgtgtatgtgcctgctaatgtaaactctgtcatagttcccatttactaactgccctagaaagaaataaatcagagagcaaggcaccaggggcaagaatcgtgcagaatttcagaggtctggctgcaaacctggaaacctggaaggccagatgtaattctacaggcgattgttaaagctcataggttttgagtaactgcatagtaggttggtattaactagaactcctgtatagttaggacagagaggagccttcctgctcagctattcactctgaacactagcactgggctcttaagaaatgatgttttaagagcagagatctttttttaatgtctttgatttattttttagttgtaattaggtacatcctcagagatgtactttcctcctcttgtgcaggatgtggaggactcagttccatcatctggggcatctttagagtgtatagaccacactggttatgtggcttcaagttgtaaaaattaaaatgactttaaaagaaactaggggctggtccaggatcttcactggtaagactgttcttaagtaacttaagtatctttgaatctgcaagtatgtagggaaaaaaaaaagatatattattgtgaggaaatccattgtttaaaggtgtgcgtgtgttgttgttgttttttaaagggagggagtttattatttactgtagcttgaaatactgtgtaaatatatatgtatatatatgatgtgctctttgtcaactaaaattaggaggtgtatggtattagctgcatcactgtgtggatgtcaatcttacagtgtattgatgataatactaaaaatgtaacctgcatctttttccacttggctgtcaattaaagtctattcaaaagg

SEQ ID NO: 1826 - protein, 449 aa, Mus musculus
MGSDVRDLNALLPAVSSLGGGGGGCGLPVSGAAQWAPVLDFAPPGASAYGSLGGPAPPPAPPPPPPPPHSFIKQEPSWGGAEPHEEQCLSAFTLHFSGQFTGTAGACRYGPFGPPPPSQASSGQARMFPNAPYLPSCLESQPTIRNQGYSTVTFDGAPSYGHTPSHHAAQFPNHSFKHEDPMGQQGSLGEQQYSVPPPVYGCHTPTDSCTGSQALLLRTPYSSDNLYQMTSQLECMTWNQMNLGATLKGMAAGSSSSVKWTEGQSNHGTGYESENHTAPILCGAQYRIHTHGVFRGIQDVRRVSGVAPTLVRSASETSEKRPFMCAYPGCNKRYFKLSHLQMHSRKHTGEKPYQCDFKDCERRFSRSDQLKRHQRRHTGVKPFQCKTCQRKFSRSDHLKTHTRTHTGKTSEKPFSCRWHSCQKKFARSDELVRHHNMHQRNMTKLQLAL

SEQ ID NO: 1827 - DNA, 1299 bp, Mus musculus
atgggttccgacgtgcgggacctgaacgcgctgctgcccgctgtgtcttcgctgggcggcggcggcggcggctgcgggctccctgtgagcggcgcagcgcagtgggcgcccgtgttggacttcgcgcctccgggcgcctcggcttacgggtcgctgggcggtcccgcgcctcctcccgctccgccgccgcctccgccgccaccccactccttcatcaaacaggagcccagctggggcggcgccgagccacacgaggagcagtgcctgagcgccttcaccttgcacttctcgggccagttcaccggtacagccggggcctgtcgctacggacccttcggtcctcccccgcccagccaggcgtcctcgggccaggccaggatgttccccaatgcgccctacctgcccagctgcctggagagccagcctaccatccgcaaccaaggatacagcacggtcactttcgacggggcgcccagctatggccacacgccctcgcatcacgcggcgcagttccccaaccattccttcaaacacgaggaccccatgggccagcagggctcgctgggcgagcagcagtactccgtgccacctccggtgtatggctgccacacccctactgacagttgcacaggcagccaggccctgctcctgaggacgccctacagcagtgacaatttataccaaatgacctcccagcttgaatgcatgacctggaatcagatgaacctaggagctaccttaaagggccacggcacagggtatgagagtgagaaccacacggcccccatcctctgtggtgcccagtacagaatacacacccacggggtcttccgaggcattcaggatgtgcggcgtgtatctggagtggccccaactcttgtccggtcagcatctgaaaccagtgagaaacgtcctttcatgtgtgcatacccaggctgcaataagagatattttaagctgtcccacttacagatgcatagccggaagcacactggtgagaaaccataccagtgtgacttcaaggactgcgagagaaggttttctcgctcagaccagctcaaaagacaccaaaggagacacacaggtgtgaaaccattccagtgtaaaacttgtcagcgaaagttttcccggtccgaccatctgaagacccacaccaggactcatacaggtaaaacaagtgaaaagcccttcagctgtcggtggcacagttgtcagaaaaagtttgcgcgctcagacgaattggtccgccatcacaacatgcatcagagaaacatgaccaaactccagctggcgctttga

SEQ ID NO: 1828 - protein, 432 aa, Mus musculus
MGSDVRDLNALLPAVSSLGGGGGGCGLPVSGAAQWAPVLDFAPPGASAYGSLGGPAPPPAPPPPPPPPHSFIKQEPSWGGAEPHEEQCLSAFTLHFSGQFTGTAGACRYGPFGPPPPSQASSGQARMFPNAPYLPSCLESQPTIRNQGYSTVTFDGAPSYGHTPSHHAAQFPNHSFKHEDPMGQQGSLGEQQYSVPPPVYGCHTPTDSCTGSQALLLRTPYSSDNLYQMTSQLECMTWNQMNLGATLKGHGTGYESENHTAPILCGAQYRIHTHGVFRGIQDVRRVSGVAPTLVRSASETSEKRPFMCAYPGCNKRYFKLSHLQMHSRKHTGEKPYQCDFKDCERRFSRSDQLKRHQRRHTGVKPFQCKTCQRKFSRSDHLKTHTRTHTGKTSEKPFSCRWHSCQKKFARSDELVRHHNMHQRNMTKLQLAL

SEQ ID NO: 1829 - DNA, 1693 bp, Mus musculus
gcatcggctttctccacaaaggggcacgctaacatctgatctgtggaaccgctgagctgaagaaagggaacagaggaaagcctgcaggactcctggtgccactatgtgctacgtaaagtgtgcaagatacatcggatactctctggtgtgggctgctgtcttctgcatcgtagctaatgctttgctctactttcctaatggggagacaaagtatgctacggaggaccacctcagccgtttcgtgtggtattttgccggcattgtaggcggaggcctgctgatgctcctgccagcgtttgtgttcattgggatggatgaagaggactgctgtggttgctgcggctacgaaaactacggcaagcgatgctcgatgctttcttctgtactggctgctctgattggaatcgtgggatctgcttactgtgtcattgtggcatcactgggtttggcagaaggaccaaagtgcagcgatgcccatggagtatggaactacacctttgccagcactgagggacagtaccttctgaattcctctatgtggtccaagtgctatgagcccaagcatattgtggagtggcatgtgactctattttctatcctcttggcttttgccgcagttgaattcatcttgtgtctcattcaagtaataaatggaatgcttggaggcttatgtggctattgctgctctcgccaacagcaatataactgctaaaaaagaacacaagacagaagggcgtgcttcctgtatttcactgtaatttgtatattttccctgtgttgtgagactttgcaccttgtgccacatcctaccctttctgcttttgtaaggaaatgtgctgacgtcatcacatgatgtcagtgtttacattcacaaaacaaacaaggcagcaaactgcactctctccgaagggattttacagacttaaggactgttctcagcatagctgagataaactcttcagtgtttgagataaaaatcagagctaactattgtgcatatgtgcatttttttttaaataaaagatctccgatttcctttttaagaccaagaaggaccaaaataaaaaaaaaagaaaaacaagaaagatatattttactgttcatatgctgtttcccatttgtatgtgaatgagtctctaagaaaccctctgaagtgagattttctcttacctggattcggaaatctcattgagagcgtgctaacccaagtatgggagaggaaatatataatactgacaatgtctgtgaaacactactcaaggctgaagttgtgcagcttgtagaaacctttttgcctttcaaagacaaagactgtttctgtaaagaggaaggtcaggatagttagacaaggaaaatgagaaatggtgggaaaacagaagagaggtggggcagggtcaggaagctcacaggggaatgcttcccaagcttgcttctgagcataaaattaagtattcaataccattcagctgtggctttagttttacgtctgaagtgacaccctctctcatcaggcaatttatcggagtcacgtagagaggacttcttcctaacacatagaaagatctattacctttcctggaagacaaaagacgttttcagagtacaggcttctgggtctggagatctggtttctaacttaatagaatttgatttgaaaggttacacacagtgaatacactcagtaggacaagcc

SEQ ID NO: 1830 - protein, 202 aa, Mus musculus
MCYVKCARYIGYSLVWAAVFCIVANALLYFPNGETKYATEDHLSRFVWYFAGIVGGGLLMLLPAFVFIGMDEEDCCGCCGYENYGKRCSMLSSVLAALIGIVGSAYCVIVASLGLAEGPKCSDAHGVWNYTFASTEGQYLLNSSMWSKCYEPKHIVEWHVTLFSILLAFAAVEFILCLIQVINGMLGGLCGYCCSRQQQYNC

SEQ ID NO: 1831 - DNA, 2002 bp, Mus musculus
gctcactctgctcccccgggtcggagccccccggagctgcgcgcgggcttgcagtgccttgcccgcgccgacctcccggcgcccggcttcgcgcgttcgcgccgcccgctgtccagagcccccacgagcagagcgagggagtcccggacgagctcgagctccggccgcctctcgcttcccccgctcggctccctccgccccccgggggtcgctagtccacgatgccgcggggccctgcctcgctgctgctgctagtcctcgcctcgcactgctgcctgggctcggcgcgtgggctcttcctcttcggccagcccgacttctcctacaagcgcagcaactgcaagcccatccccgccaacctgcagctgtgccacggcatcgagtaccagaacatgcggctgcccaacctgctgggccacgagaccatgaaggaggtgctggagcaggcgggcgcctggattccgctggtcatgaagcagtgccacccggacaccaagaagttcctgtgctcgctcttcgcccctgtctgtctcgacgacctagatgagaccatccagccgtgtcactcgctctgcgtgcaggtgaaggaccgctgcgccccggtcatgtccgccttcggcttcccctggccagacatgctggagtgcgaccgtttcccgcaggacaacgacctctgcatccccctcgctagtagcgaccacctcctgccggccacagaggaagctcccaaggtgtgtgaagcctgcaaaaccaagaatgaggacgacaacgacatcatggaaaccctttgtaaaaatgacttcgcactgaaaatcaaagtgaaggagataacgtacatcaacagagacaccaagatcatcctggagacaaagagcaagaccatttacaagctgaacggcgtgtccgaaagggacctgaagaaatccgtgctgtggctcaaagacagcctgcagtgcacctgtgaggagatgaacgacatcaacgctccgtatctggtcatgggacagaagcagggcggcgagctggtgatcacctccgtgaaacggtggcagaagggccagagagagttcaagcgcatctcccgcagcatccgcaagctgcaatgctagtttcccagtggggtggcttctctccatccaggccctgagctctgtagaccacttccgctccgcgacctcatttccggtttcccaagcacagtccgggaaagctacagccccagcttggagccgcttgccctgcctcctgcatgtgtgtatccctaacatgtcctgagttataaggccctaggaggccttggaaacccatagctgttttcacggaaagcgaaaagcccatccagatcttgtacaaatattcaaactaataaaatcatgactatttttatgaagttttagaacagctcgttttaaggttagttttgaatagctgtagtactttgacccgaggggcattttctctctttggtcagtctgttggcttataccgtgcacttaggttgccatgtcaggcgaattgtttctttttttttttttttttccctctgtggtctaagcttgtgggtcccagacttagttgagataaagctggctgttatctcaaagtcttcctcagttccagcctgagaatcggcatctaagtcttcaaacatttcgttgctcgttttatgccctcatgagctctgaccattgcatgcgttcccatcccagctacagaacttcagtttataagcacacagtaaccattcctcattgcatgatgccctcaaataaaaagtgaatacagtctataaattgacgagtattttaagctttgtttaaaacatcttttaattcaattttttaatcattttttttgcaaactaaatcattgtagcttacctgtaatatacgtagtagttgacctggaaaagttgtaaaaatattgctttaaccgacactgtaaatatttcagataaacattatattctttgtatataaactttacatcttgttgtacctat

SEQ ID NO: 1832 - protein, 295 aa, Mus musculus
MPRGPASLLLLVLASHCCLGSARGLFLFGQPDFSYKRSNCKPIPANLQLCHGIEYQNMRLPNLLGHETMKEVLEQAGAWIPLVMKQCHPDTKKFLCSLFAPVCLDDLDETIQPCHSLCVQVKDRCAPVMSAFGFPWPDMLECDRFPQDNDLCIPLASSDHLLPATEEAPKVCEACKTKNEDDNDIMETLCKNDFALKIKVKEITYINRDTKIILETKSKTIYKLNGVSERDLKKSVLWLKDSLQCTCEEMNDINAPYLVMGQKQGGELVITSVKRWQKGQREFKRISRSIRKLQC

SEQ ID NO: 1833 - DNA, 3107 bp, Mus musculus
ataacagtgggcagttgaacagcagccagagcctgaagaagccaactccagggaggaggaaaggaagcagaaggctcggcctcggtctcctactcttggcaagatgggtgactggagcttcctgggggagttcctggaggaggtccacaagcactccacagtcatcggcaaggtctggctcactgtcctgttcattttccgcatgctggtcctgggcaccgctgctgagtcctcctggggagatgagcaggccgacttccggtgcgataccattcagcctggttgccaaaatgtctgctatgaccaagccttccccatctcccacattcgttattgggtactgcagatcatctttgtgtccacgccttctctagtgtacatgggccatgccatgcacactgtgcgcatgcaggaaaagcagaaattgcgggatgctgagaaagctaaagaggcccaccgcactggtgcctatgagtacccagtagccgaaaaggccgagctgtcctgctggaaagaagtagatgggaagattgtcctccagggcaccctactcaacacctatgtctgcaccattctgatccgcaccaccatggaggtggccttcatcgtaggccagtacctcctctatgggatcttcctggataccctgcatgtctgccgcaggagtccctgtccccacccagtcaactgttatgtttcgaggcccacggagaagaatgtcttcattgtctttatgatggctgtggctggactgtctctgtttctcagcctggctgaactctaccacctgggctggaagaagatccgacagcgctttggcaagtcacggcagggtgtggacaagcaccagctgcctggccctcccaccagcctcgtccagagcctcactcctccccctgacttcaatcagtgcctaaagaacagctccggagagaaattcttcagcgacttcagtaataacatgggctcccggaagaatccagacgctctggccactggggaagtgccaaaccaggagcagattccaggggaaggcttcatccacatgcactatagccagaagccagagtacgccagtggagcctctgcgggccaccgccttcctcagggctaccatagtgacaaacggcgccttagtaaggccagcagcaaagcaaggtcagatgacctgtcagtgtgatcctccttttagggagggccaggcccaggagggatctaaggagtgtgaggcaggaaagaaacagtctctctcgtgatggtatactctcctcagcactactttgctctgtctgtcctgggtctgggtggcattcattggcattcattgctcgttatcctcaaaattacagttctgagtcttctcaatgactgggctactcctcaagtctcattccctcctactcatctaccagtattcacagtgaagccatagtggaggcaggatcaggaaccgtggcaaaatctggtctggggaggacaggttcaacaccagcaacataccagatagaccccccacccaccccaagtcttctctttggtactatgcccatcctcttgttttgttttgttttgttttttcttaagagcccaaggttgagagtattcatcaagtaatctgccctgtatcattcctttgaatcagttgtttccatgtgccatacctcggagtgctggtgaggtaactgtgggctgcccttggctgcatctccttcctcccagtcttaaaggggtatccttggtccttggccagcatcagatttacaagtgccttggtatgtacctttggcaaatgtttcatgttgatgatgtctcagccttactgccaggctagacacccagctcgtaagggtgccaagacctccagaagtcactgtgcacacaagcatcgctggaattgccaccagctgtcatcctgcggtcctttatagtttaacctaatgacagaaaccatcctggccggctcacccaccgttcctctaaaatctttgttaacaggaatgtccaaagtcaccatcctctcttggatcctggccagattaccagccaccaagttcagtggaatttccccaggatttactgaaacaaagagagcattgtgcttctcgggttcttctgggtctggggatgggggtggagggggaaattctgctgtgaagatgaaaaggtggggggaggacactgaaaaactattttcccttctgtgtatgccttccactgtctgccagcttttaatgccgagaggtgtggtgatagcaattgaggcccaagatctctcttagaggcatcaaggagacatggaagcagaaagggtccagttggtttggacccttatttagtgcagatattcctatgttttcttggtacccctaggtacaacaggggaggactgtagaaaatccctgccttcctcagggtctatcctggggtatctactgagtggatccatcttatgcagatggaagaagctcagcaccagataccgagatttacaaacacaatactgtgtgtgtgtgtgtgtgtgtgtgtgtgtgtgtgtgtttgtgtgtgcatgcccatccatctctgtgtgcctctgtgtgtgtgtgctcgtgtgtgcatgcagatagaatggtgaagaagagccctgaagaacgataaggaaacatgtagagaaacttgggtctttctgcttccttctcagttgtctggcaggagggctgagcttgcttcttaatcagcctaaagatcaggcatgagaagttcaggagggtgaagggtcagaggtcagtccctgtcccagtgacccatctctgggtccctctgctggcatttggttgctactaatggatagaaagaaattgactgaggatacctgggaaaggaagacgggctgttccagtcccagtgcatttcatccattcccgacactggcactaagactctctgttctggctatggagtgtgtgtttgttttctgaaatgggatttttttgaattagaaaatctgagaccagtcgttgatggtgaggttttttttgttttctgtttttttttttttttttttttcagaagagaaagaggaaatactatgtttgactggttttaaataaaatctatctctacatgcc

SEQ ID NO: 1834 - protein, 358 aa, Mus musculus
MGDWSFLGEFLEEVHKHSTVIGKVWLTVLFIFRMLVLGTAAESSWGDEQADFRCDTIQPGCQNVCYDQAFPISHIRYWVLQIIFVSTPSLVYMGHAMHTVRMQEKQKLRDAEKAKEAHRTGAYEYPVAEKAELSCWKEVDGKIVLQGTLLNTYVCTILIRTTMEVAFIVGQYLLYGIFLDTLHVCRRSPCPHPVNCYVSRPTEKNVFIVFMMAVAGLSLFLSLAELYHLGWKKIRQRFGKSRQGVDKHQLPGPPTSLVQSLTPPPDFNQCLKNSSGEKFFSDFSNNMGSRKNPDALATGEVPNQEQIPGEGFIHMHYSQKPEYASGASAGHRLPQGYHSDKRRLSKASSKARSDDLSV

SEQ ID NO: 1835 - DNA, 3030 bp, Mus musculus
cagtcatacagtttatcaagaaagaagatagtgcactacacctctttcgaccagcggaaaagagcaaacgcagcattcttgataggtgcttatgccgtcatctacttaaagaagacaccagaagaagcgtacagagctctcctgtctggctcaaaccctccttatcttccattcagggatgcatcttttggaaactgcacttacaacctcaccgtccttgactgtttacaaggaatcagaaagggattacagcatgggttttttgactttgagacgtttgatgcggaagaatatgaacattatgagcgagttgaaaacggagacttcaactggatcgttccaggaaagtttttagcgttcagtggaccgcatcctaaaagcaagattgagaatggttaccctctccacgctcccgaagcctactttccatacttcaaaaagaacaacgtgaccacgatcgtgagattgaacaaaaagatctacgaggcgaagcgcttcacagacgctggcttcgagcactatgacctgttcttcatagacggcagcacccccagcgataacatcgtgcggagattcctgaacatctgtgagaacaccgagggggccatcgcggtccactgcaaagctggtctgggaagaaccgggacattgatagcctgttatgtcatgaaacactacaggtttacacatgctgaaatcattgcttggatcagaatttgccgaccaggctccatcatcggaccccagcagcacttcctgaaagaaaaacaagcatcattgtgggtccaaggagacatttttagatccaaactaaaaaatagaccatccagtgagggaagtattacaaaaattatttctaccctggatgatatgtctattggtgcaaatttatccaaattacaaagcacagaaaggattggagagaataattttgaagacgaagatatggaaattaagaacaacgtaacgcagggagacaaactacgtgccttaaaaagccagaggcatccccgctcctcgccatcctgtgcatttaggtcagatgatatgaaaggacaccaaagggcaatggcccagactttcagattaagttcctcaccgcaaccaactatgtcgaccatgaagacctccaaagtgtgtttgtccccttcagtgacagccaaaaaaataagccgaggttctttgtcttcaggagcaaatataagaagcttctccataaattcccggctagccagttctctagggaacttgaacgccgggacagaagaacctgagaccaagaagaccacatcactcaccaaggccgctttcatagccagcccattcaccagcttcttgaatggcagcacccagacacctggcagaaactaccctgagctcaacaacaaccagtacaccagaagcagcaacagcaacagcagcagcagcagcagcggtcttgggggcaacctgaacagctctccagtcccccagagcgccaagcccgaggagcacaccaccatccttcgaccttccttcccggggtcactctcttcctcctcagtgagattcctgagccgttctataccttcccttcagtctgaatacgttcattactaaggccttgccactccagtgaagacagttccgatcttacacatctggatgtgcaatgcggaaggaaacagctgcttgcccggaggatgtccctgccttcttaccttaaagtagagagagtattaacattgtactgttgagagacttgagaccagagcgctggctaatgactactatccatgcactggagtgatctttatggagctgtccatacttgtaaagacagttttaatgttaaatttggtattttaaaaggttatttttaatgtatttcagtgatgtatttgttactgcattgacatgtacagtgttacacatatatgtatcatgaactttataaaagactattttgataattttataaatatataaaattatgtaaaagctatactatattttgatttagattttcctgctgtttgttaccaaaaaatttgtattttaaatttgtttagctttagtatggttttgtctacaatgagtatgtaattcttccttattaaatgaaaatgagggagcgaattttgagatgtgattttaatgctcccctatggattcagtagatcaggccattctctgctgaagcctgtctgaactagaattcatccaaatttatctctaccaagagtggggttatttgataggttcgtttaggaaaaaaatttgcccctttgttttttttcttgagtcttttaagtaggaggctttaaaaaaaattgagcatttttttaagatcagaaataatgggcgtttctcctgaaagcatgattttctccctctgtgaaacggcagaacattccagtgcttttatttctttccttctctcacgcgtgctttaaaaaaaagaaaatgccttaaatcatttattttgcttatgccttcttgtaaatatgcaaaggaaggatacgaattttaaggcccaggtctacggttcgaaagaacacacccagtaaatgtactataatgttgttaaagaccaaaaagcacttcaaagggagttgatagctcagaactgttcttggtacgaggtggtcattgccctgtgagcatgcgtggtctgatgtcagttttaaagcaatgaaggaataaattgaaaaaaatcgctgctgagtagatctgtgcactaaaggggacatttaaatggaagcaccctcccgatcccggtccagaccggatgtacacaacggtctgtctgcaaccggatgtgaaactggaaggaccccacgcaccctcccagggtaccgcccagccctctcatgtgtgattctgaatttaagtttccagaagcctactggctttttgtctcgttgagattcttagatatcgattgtcttccaggctgcttgagaatgggcaaggactagttaaatggattcatacaaagtgctttattccaacggttgagttatttatactgtatttattaggaggggg

SEQ ID NO: 1836 - protein, 523 aa, Mus musculus
QSYSLSRKKIVHYTSFDQRKRANAAFLIGAYAVIYLKKTPEEAYRALLSGSNPPYLPFRDASFGNCTYNLTVLDCLQGIRKGLQHGFFDFETFDAEEYEHYERVENGDFNWIVPGKFLAFSGPHPKSKIENGYPLHAPEAYFPYFKKNNVTTIVRLNKKIYEAKRFTDAGFEHYDLFFIDGSTPSDNIVRRFLNICENTEGAIAVHCKAGLGRTGTLIACYVMKHYRFTHAEIIAWIRICRPGSIIGPQQHFLKEKQASLWVQGDIFRSKLKNRPSSEGSITKIISTLDDMSIGANLSKLQSTERIGENNFEDEDMEIKNNVTQGDKLRALKSQRHPRSSPSCAFRSDDMKGHQRAMAQTFRLSSSPQPTMSTMKTSKVCLSPSVTAKKISRGSLSSGANIRSFSINSRLASSLGNLNAGTEEPETKKTTSLTKAAFIASPFTSFLNGSTQTPGRNYPELNNNQYTRSSNSNSSSSSSGLGGNLNSSPVPQSAKPEEHTTILRPSFPGSLSSSSVRFLSRSIP

SEQ ID NO: 1837 - DNA, 1391 bp, Mus musculus
aaaataagtaggaatgggcagcgtctgctcacagtcagtacacctttcccatttgctaatacggcctggccaggctgagaggaatccttccctgccttaccctggacagtgaagccactgagaccatcggtaggcaccatgcggctgcttcaagcgactgttcttttcttccttttgtccaacagtctctgccacagtgaggacggcaaagatgttcagaatgactctattccaacaccggcagaaacttccacaacaaaagcctctgtcacaataccaggcatcgtgtcagtgacaaatcctaacaaaccagcagatggaacacctcccgaaggaacgaccaaaagtgacgtatcccaaacatctttggtgacaacaattaattcactgacaacaccaaaacatgaagtgggaacaacaactgaaggtcccctaaggaatgaaagttccactatgaaaataacagtgccaaatactccaacttcaaatgctaattcaacgctaccaggttcccagaacaagattactactcaactactggatgccttgccgaaaatcactgcaacatcctctgcatctctaacaactgcacacaccatgtcactgcttcaagatactgaggataggaagattgcaaccactccatcaaccaccccctcctattccagtatcattttgcctgtggttatcgcgctggttgttataacactcttggtatttactctggtgggtttgtatcgaatatgctggaagagagacccaggcactccagaaaacggaaatgatcagcctcagtccgataaagagagtgtgaagctgctcactgttaagacaatctctcatgagtctggcgaacactctgcacaggggaaaaccaagaactgacatcgtgatggatcctccctacacctgggcaataaatatgcttcatcttcagcttctaaactccaagggtggaaagaagaaaaagtcctgaggaaccaacacaatttccagtcttctcaccagtctacaccagtcacctgtcttagcaaaggaatgccatatcaccacctgatagtaccataaagagctctggatatctcctgtgtgagatgtagaaatcgacctagttttcagcgactttgctaggaggaactgtgatccccccagcccaggcaggtgggttcctggaaaacatgccgtagttgagtttagactttccaggttttcttagcctcgatccgtggagaaacttgcctgttttctttgagttcttgtgttagccagtgtcagtatttattgtttcccactgtgttaacacaggaagagttttgcaagtgtgttaattaatgttaaatgataactagaaatgtttcctttaataaagaatggctgtactcagcatgctc

SEQ ID NO: 1838 - protein, 248 aa, Mus musculus
MRLLQATVLFFLLSNSLCHSEDGKDVQNDSIPTPAETSTTKASVTIPGIVSVTNPNKPADGTPPEGTTKSDVSQTSLVTTINSLTTPKHEVGTTTEGPLRNESSTMKITVPNTPTSNANSTLPGSQNKITTQLLDALPKITATSSASLTTAHTMSLLQDTEDRKIATTPSTTPSYSSIILPVVIALVVITLLVFTLVGLYRICWKRDPGTPENGNDQPQSDKESVKLLTVKTISHESGEHSAQGKTKN

SEQ ID NO: 1839 - DNA, 2544 bp, Mus musculus
aggaatgggcagcgtctgctcacagtcagtacacctttcccatttgctaatacggcctggccaggctgagaggaatccttccctgccttaccctggacagtgaagccactgagaccatcggtaggcaccatgcggctgcttcaagcgactgttcttttcttccttttgtccaacagtctctgccacagtgaggacggcaaagatgttcagaatgactctattccaacaccggcagaaacttccacaacaaaagcctctgtcacaataccaggcatcgtgtcagtgacaaatcctaacaaaccagcagatggaacacctcccgaaggaacgaccaaaagtgacgtatcccaaacatctttggtgacaacaattaattcactgacaacaccaaaacatgaagtgggaacaacaactgaaggtcccctaaggaatgaaagttccactatgaaaataacagtgccaaatactccaacttcaaatgctaattcaacgctaccaggttcccagaacaagactgagaatcagagttcaatcagaacaacggaaatatcagttactactcaactactggatgccttgccgaaaatcactgcaacatcctctgcatctctaacaactgcacacaccatgtcactgcttcaagatactgaggataggaagattgcaaccactccatcaaccaccccctcctattccagtatcattttgcctgtggttatcgcgctggttgttataacactcttggtatttactctggtgggtttgtatcgaatatgctggaagagagacccaggcactccagaaaacggaaatgatcagcctcagtccgataaagagagtgtgaagctgctcactgttaagacaatctctcatgagtctggcgaacactctgcacaggggaaaaccaagaactgacatcgtgatggatcctccctacacctgggcaataaatatgcttcatcttcagcttctaaactccaagggtggaaagaagaaaaagtcctgaggaaccaacacaatttccagtcttctcaccagtctacaccagtcacctgtcttagcaaaggaatgccatatcaccacctgatagtaccataaagagctctggatatctcctgtgtgagatgtagaaatcgacctagttttcagcgactttgctaggaggaactgtgatccccccagcccaggcaggtgggttcctggaaaacatgccgtagttgagtttagactttccaggttttcttagcctcgatccgtggagaaacttgcctgttttctttgagttcttgtgttagccagtgtcagtatttattgtttcccactgtgttaacacaggaagagttttgcaagtgtgttaattaatgttaaatgataactagaaatgtttcctttaataaagaatggctgtactcagcatgctcaacatcacggctcgtgtggcactggcattgtagccccataattgtggcaagcattgggttggaatatgaggactcatcagtatatgcaaagaacatctataaaaagcaccaaaggaccaaaggactaaagtataagccagtagtaaagggaaagaaatcaccaccatttctttggtttctctcacttataattcacaccatctgacaagaatgcctgggctcttgtgatatcatggttaaattcctttgattgatccatttcactgatactatctctgtggttagttttatttacttatttttagaaatatcagacgtgggacaagcaatcattattactaaaatttcagtctctagaaaatcaacatcttatcagtgcttgattgaaatattattttccaatgagtcaccttcctaaaaattccataaaaatatagcaaggaccccgtcaagaacagattccactcttgaaaccttgatcaaccttgaccatgttcgtggcatgtgagatcaaaatgttaagatggctagagctctggggaaatttctggaattaacaagctttgcatggtagctctgttaaacatctatgatttcttcagctgaactcaatgaaagcttattttactgatctgagggaaggtgaaggcatatgttatagagtcatgttgattttctttaactgtgatatagtgaaacctttcagctgtagggtcatgtaatcactttgactttacattcctaatatttgagctgcatcttatcaaaggtatcaagcaagcacatatacaactcccatggatttctccctattgttctgtgagaaggatagcaaaagaggaaaaaaagaaaagaggaatcaacagcacatgcgccttgggactatttctccttaaaaggctttaaaagtgtgagagattggttgcagcacccccagcagggggtatttgtaattattctagattgttccaatgaccacctcacaaatgccttttaaagtagttttttgtattgcaaagaaacaaactcttttacttcaggcaaaatggctttcatgaacatcatctgtattgatttcatcattccagattaagaagtggtcataaagaaactgctctaaacc

SEQ ID NO: 1840 - protein, 261 aa, Mus musculus [sequence omitted]

SEQ ID NO: 1841 - DNA, 3774 bp, Mus musculus
atgtccaaaagcttgaaaaagaaaagccactggactagcaaagtccacgagagtgtcattggcaggaacccggagggccagctgggctttgaactgaaggggggcgcggaaaacggacagttcccctacctgggggaggtgaagccgggcaaggtggcctatgaaagcggcagcaagttggtgtccgaggagctgctgctggaggtgaacgagacccccgtggcggggctcaccatcagggacgttctggccgtgatcaaacactgcaaggaccccctccggctcaagtgtgtcaagcaaggaggaattgttgataaagaccttcgtcactacctcaacctaagatttcagaagggttctgttgaccatgaactacagcaaatcatccgtgacaacctctacctccgcacagtgccatgcaccacaaggccacataaggagggtgaggtccctggagtggactacattttcataaccgttgaggagtttatggaattggagaaaagtggtgctctcctagaaagcgggacctatgaagacaactactacggtaccccgaagcctccagctgaaccagcaccattattaaatgtaacagaccagatacttccgggagctactccaagtgctgaggggaagcggaaaagaaataagtcagtgaccaacatggagaaagcaagtatagagcctccagaggaggaagaagaagaaaggcctgtagtcaatggaaacggcgtggtcataaccccagaatccagtgaacatgaagacaaaagtgcaggtgcctcaggggagacaccctcccagccttaccctgcacccgtgtacagccagcccgaagagctcaaggaccagatggacgatacaaagccaacaaagcctgaggagaacgaggactctgatccattgcctgataactgggaaatggcctacacagagaagggggaagtctacttcattgaccataacacaaagacaacatcatggctggatccgcgacttgcgaaaaaggctaaacctccagaagagtgcaaagaaaatgagcttccatatggctgggaaaaaatcgatgatcctatatatggcacttactatgttgaccacataaatagaagaacacagtttgaaaaccctgtcctggaagcaaaaaggaagctacagcaacataacatgccccacacagaacttggagcaaagcccctgcaggccccaggtttccgagaaaagccactcttcacccgggatgcatcccagttgaagggaacgttcctcagcaccaccctcaaaaagagcaacatgggctttgggtttaccatcattggtggagacgagccggatgagtttctacaggtgaaaagtgtgatcccggatgggcctgccgcacaggatgggaaaatggagacaggtgatgtcattgtctatattaatgaagtttgtgtccttggacacactcatgcagatgttgtcaaacttttccagtctgttcctattggtcagagtgtcaacttggtgttgtgtcgtggctaccctttgccctttgaccctgaagatcctgctaacagcatggtgccaccccttgcaataatggagaggccacctccggtgatggtcaatggaagacataactatgaaacatacttggaatacatttctcggacctcacagtcggtcccagatattacagaccggccacctcattctttgcactccatgccagctgacggccagctagatggcacgtatccaccacccgtccatgacgacaatgtgtctatggcttcgtctggagccactcaagctgaacttatgaccttaaccattgtgaaaggtgcccagggatttggctttactattgccgacagtcccacgggacagcgggtgaaacaaatccttgacattcagggatgccctgggctgtgtgaaggagacctcattgttgagatcaaccaacagaatgtacagaacctgagccatacagaagtagtggatatacttaaggactgccccgttggaagtgagacttctttaatcatccatcgaggaggtttcttttctccatggaaaactccaaagcctatgatggaccgatgggagaaccaaggcagtccacaaacaagtttatctgctccggccgtcccacagaacctgcccttcccacctgcccttcacaggagctcctttcctgattcaacagaggcctttgacccacggaagcctgacccatatgagctctacgagaaatcgagagccatttatgaaagtaggcaacaagtgccacccaggaccagttttcgaatggattcctctggcaagccagattataaggaactggatgttcaccttcggaggatggagtctggatttggctttagaatccttgggggagatgaacctggacagcctattttgatcggagccgtcattgccatgggctcagctgacagagacggccgtctacacccaggagatgagcttgtctatgtcgatgggatcccagtggctggcaagacccaccgctatgtcatcgacctcatgcaccacgcggcccgcaatgggcaggttaacctcactgtgagaagaaaggtgctatgtggaggggagccctgcccagagaatgggaggagtccaggctctgtatcaactcaccacagctctccgcgcagtgactatgccacctactccaacagcaaccacgccgcccccagcagcaatgcctcacctcctgaaggctttgcctcacacagcttgcagaccagtgatgtggtcattcaccgcaaagaaaacgaagggtttggcttcgtcatcatcagctctctgaacaggcctgagtctggagccaccataactgtgccccataaaattggacgaatcattgatgggagccctgcagatcgctgtgccaaactcaaagtgggcgaccgtatcttagcagtcaacggccagtctatcatcaacatgcctcacgctgacattgtgaagctcatcaaggacgccggtctcagtgtcacccttcgcatcattcctcaggaggagctcaacagcccaacatcagcacccagttcagagaaacagagccccatggcccagcagcacagccctctggcccagcagagtcctctggcccagccaagccccgccacccccaacagcccagtcgcacagccagctcctccccaacctctccagctgcaaggacacgaaaatagttacaggtcagaagttaaagcgaggcaagatgtgaagccagacatccggcagcctcccttcacagactacaggcagcccccgctggactacaggcagcccccgggaggagactactcacagcccccacccttggactacaggcagcactctccagacaccaggcagtaccctctgtcagactacaggcagccacaggattttgattatttcactgtggacatggagaaaggagccaaaggatttggattcagcattcgtggaggaagggaatacaagatggatctgtatgtgttgagattggcagaggatgggccagccataaggaacggcaggatgagggtaggagatcagatcattgaaataaatggggaaagcacacgagacatgacccacgccagagcaatagaactcatcaagtctggaggaagaagagtgcggctgctgctgaagagaggcacggggcaggtcccggagtatggaatggtaccttccagcctctccatgtgcatgaaaagtgacaagcatgggtccccatatttctacttactgggccaccctaaagacacg

SEQ ID NO: 1842 - protein, 1258 aa, Mus musculus
MSKSLKKKSHWTSKVHESVIGRNPEGQLGFELKGGAENGQFPYLGEVKPGKVAYESGSKLVSEELLLEVNETPVAGLTIRDVLAVIKHCKDPLRLKCVKQGGIVDKDLRHYLNLRFQKGSVDHELQQIIRDNLYLRTVPCTTRPHKEGEVPGVDYIFITVEEFMELEKSGALLESGTYEDNYYGTPKPPAEPAPLLNVTDQILPGATPSAEGKRKRNKSVTNMEKASIEPPEEEEEERPVVNGNGVVITPESSEHEDKSAGASGETPSQPYPAPVYSQPEELKDQMDDTKPTKPEENEDSDPLPDNWEMAYTEKGEVYFIDHNTKTTSWLDPRLAKKAKPPEECKENELPYGWEKIDDPIYGTYYVDHINRRTQFENPVLEAKRKLQQHNMPHTELGAKPLQAPGFREKPLFTRDASQLKGTFLSTTLKKSNMGFGFTIIGGDEPDEFLQVKSVIPDGPAAQDGKMETGDVIVYINEVCVLGHTHADVVKLFQSVPIGQSVNLVLCRGYPLPFDPEDPANSMVPPLAIMERPPPVMVNGRHNYETYLEYISRTSQSVPDITDRPPHSLHSMPADGQLDGTYPPPVHDDNVSMASSGATQAELMTLTIVKGAQGFGFTIADSPTGQRVKQILDIQGCPGLCEGDLIVEINQQNVQNLSHTEVVDILKDCPVGSETSLIIHRGGFFSPWKTPKPMMDRWENQGSPQTSLSAPAVPQNLPFPPALHRSSFPDSTEAFDPRKPDPYELYEKSRAIYESRQQVPPRTSFRMDSSGKPDYKELDVHLRRMESGFGFRILGGDEPGQPILIGAVIAMGSADRDGRLHPGDELVYVDGIPVAGKTHRYVIDLMHHAARNGQVNLTVRRKVLCGGEPCPENGRSPGSVSTHHSSPRSDYATYSNSNHAAPSSNASPPEGFASHSLQTSDVVIHRKENEGFGFVIISSLNRPESGATITVPHKIGRIIDGSPADRCAKLKVGDRILAVNGQSIINMPHADIVKLIKDAGLSVTLRIIPQEELNSPTSAPSSEKQSPMAQQHSPLAQQSPLAQPSPATPNSPVAQPAPPQPLQLQGHENSYRSEVKARQDVKPDIRQPPFTDYRQPPLDYRQPPGGDYSQPPPLDYRQHSPDTRQYPLSDYRQPQDFDYFTVDMEKGAKGFGFSIRGGREYKMDLYVLRLAEDGPAIRNGRMRVGDQIIEINGESTRDMTHARAIELIKSGGRRVRLLLKRGTGQVPEYGMVPSSLSMCMKSDKHGSPYFYLLGHPKDT

SEQ ID NO: 1843 - DNA, 438 bp, Mus musculus
ttgtgtgtaatactggagccaatgcaggaactgatgtcgagacacaaaacctacaacctcagtccccgagactgcctgaagacctgtctgtttcagaagtggcagcggatggtggccccgccagcagaacccacaaggcaaccgacaaccaaaaggagaaaacgaaaaaactccacaagcagcacgtccaatagcagtgccgggaacacgaccaacagtgccggcagcaagaagaagaccccggcggcaagcctgagcctggccactcaggtacctgatgtgatggtggtaggagagccaactctgatgggaggtgagtttggggacgaggacgaaaggctaatcactagattagaaaacacgcacccgtggaacagtaaacctcccgccacgcaagagaccaaatcagaaaacgccccaccccaggcttcccagtaa

SEQ ID NO: 1844 - protein, 145 aa, Mus musculus
LCVILEPMQELMSRHKTYNLSPRDCLKTCLFQKWQRMVAPPAEPTRQPTTKRRKRKNSTSSTSNSSAGNTTNSAGSKKKTPAASLSLATQVPDVMVVGEPTLMGGEFGDEDERLITRLENTHPWNSKPPATQETKSENAPPQASQ

SEQ ID NO: 1845 - DNA, 996 bp, Mus musculus
atgtccagcacaccacatgaccccttctattcttctcctttcggcccattttataggagacatacaccatacatggtacagccagagtaccgaatctatgagatgaacaagagactgcagtctcgtacagaggacagtgacaacctctggtgggatgcgtttgccactgaattttttgaagatgatgccacattaacactttcattttgtttggaagacggaccaaagcgatacactatcggcaggaccctcattccccgttattttagcaccgtatttgaaggaggggtgacagacctgtactacatccttaaacactcaaaggagtcatatcacaactcatccatcacagtagactgcgaccagtgtgccatggtcacacagcatgggaagcccatgtttaccaaggtatgcacagaaggcaggctgatcttggaattcacatttgatgacctcatgagaataaaaacgtggcactttaccattagacagtacagggagctggtccccagaagcatactagccatgcacgcacaagatcctcaggtcctggatcagctgtccaaaaatatcaccaggatgggtctcacaaacttcaccctcaactacctcaggttgtgtgtaatactggagccaatgcaggaactgatgtcgagacacaaaacctacaacctcagtccccgagactgcctgaagacctgtctgtttcagaagtggcagcggatggtggccccgccagcagaacccacaaggcaaccgacaaccaaaaggagaaaacgaaaaaactccacaagcagcacgtccaatagcagtgccgggaacacgaccaacagtgccggcagcaagaagaagaccccggcggcaagcctgagcctggccactcaggtacctgggctaggagccatcccgaactgcagcctcaaccctgggagggatggagacctgtgtcattcaacagcagtgaccccttctggccaatttaaggagaagcattga

SEQ ID NO: 1846 - protein, 331 aa, Mus musculus
MSSTPHDPFYSSPFGPFYRRHTPYMVQPEYRIYEMNKRLQSRTEDSDNLWWDAFATEFFEDDATLTLSFCLEDGPKRYTIGRTLIPRYFSTVFEGGVTDLYYILKHSKESYHNSSITVDCDQCAMVTQHGKPMFTKVCTEGRLILEFTFDDLMRIKTWHFTIRQYRELVPRSILAMHAQDPQVLDQLSKNITRMGLTNFTLNYLRLCVILEPMQELMSRHKTYNLSPRDCLKTCLFQKWQRMVAPPAEPTRQPTTKRRKRKNSTSSTSNSSAGNTTNSAGSKKKTPAASLSLATQVPGLGAIPNCSLNPGRDGDLCHSTAVTPSGQFKEKH

SEQ ID NO: 1847 - DNA, 894 bp, Mus musculus
atggtgcgccgagatcgcttgcgcaggatgagagagtggtgggtccaagtagggctcctggctgtgcccttgctggctgcgtacctgcacatcccgccccctcagctctcccctgctctgcactcatggaagacttctggcaagtttttcacctacaaaggcctacgcatcttctaccaagattctgtcggtgtggtcggaagccctgagatagttgtgcttttacatggctttccaacatccagctatgactggtacaagatctgggaagggctgaccctgaggttccatcgagtgatcgcccttgatttcttaggctttggcttcagtgacaagccgagaccacatcagtactccatatttgagcaggccagcatcgtagagtcccttctgcggcacctggggctccagaaccgcagaatcaacctgctgtctcacgattatggagatatcgttgctcaggaactgctgtacaggtacaagcagaatcgatctggccggctcaccataaagagtctctgtctgtcgaatggaggtatctttcctgagacgcatcgtcctctccttctccaaaagctcctcaaagacggaggtgtgctttcccccatcctcaccaggctcatgaatttcttcgtgttctctcgaggtctcactccagtctttggaccgtatactcgacccactgagagtgagctgtgggacatgtgggctgtgattcgcaacaatgacggcaacctggtcatcgacagtcttttacagtacattaatcaaaggaagaaattcagaagacgctgggtgggagcgcttgcttctgtgtccatccccattcattttatctatgggccattggatcctataaatccgtatccagagtttttggagctgtacaggtga

SEQ ID NO: 1848 - protein, 297 aa, Mus musculus
MVRRDRLRRMREWWVQVGLLAVPLLAAYLHIPPPQLSPALHSWKTSGKFFTYKGLRIFYQDSVGVVGSPEIVVLLHGFPTSSYDWYKIWEGLTLRFHRVIALDFLGFGFSDKPRPHQYSIFEQASIVESLLRHLGLQNRRINLLSHDYGDIVAQELLYRYKQNRSGRLTIKSLCLSNGGIFPETHRPLLLQKLLKDGGVLSPILTRLMNFFVFSRGLTPVFGPYTRPTESELWDMWAVIRNNDGNLVIDSLLQYINQRKKFRRRWVGALASVSIPIHFIYGPLDPINPYPEFLELYR

SEQ ID NO: 1849 - DNA, 5302 bp, Mus musculus
cggggcgggagtcttcgcagcaacgtgcgcggggccgcagcggcgcagacaccgcccgggccgcagacaccttcgctcgtcgctgctggctccgtgtcccagcccagctctgcggtaggcaggaggagcggccggatcgcgactccggagttcgcggccgtcgccaggcctcccggagcggcgccgacgctcccgctgtccggacgcgcgaccctgcgccagcgccgcagccacctgctcggagtccccgggcgagcacaaccatgcctcccactacggcgctctccgcgctgctgctgctgctactgtcgcctgcatctcactcccataatggaaatgagactagcacatctgctatcaaatctagcactgtccagagccaccaaagtgccacaacatcaacagaagtcacaactggtcacccagtggcatctacacttgcttcaacccagccaagcaaccctacaccattcacaacctcaacccaatctccatctatgccgacctccaccccaaaccccacgagcaatcaaagcggtggcaatctgacttccagtgtctccgaggtggacaagactaaaacaagctctcccagtagcacggccttcaccagtagcagtggacaaacagcctcctctggaggcaagagcggtgacagttttaccacagccccaacaaccactttggggctaatcaacgtctcttctcagcctactgaccttaataccacctcaaagcttctttctacccccacaacagacaacacaacaagccctcagcagcctgtggattcttcaccgagcacagcgagccatcctgtggggcagcatacccctgctgctgttcccagcagctctggctccacgcccagcactgacaactctacactgacatggaagcccactacacacaaaccattgggcacctctgaagccactcagcccctcaccagccagacaccaggcatcactacattgcccgtctccacactgcaacagtctatggcgtctacagtgggaactacgactgaagagttcacacacctcatctctaatgggactcccgtggcccctccaggccccagcacaccctctcccatctgggcctttggaaattaccagctaaactgtgaacctcccataaggccagatgaggaactccttattctgaacctcacaagagccagcctttgcgaaaggagccctctggatgagaaagagaaactcgtggaactgctgtgtcactcagtcaaagcgtccttcaagccagctgaggatttgtgcactctacatgtggcccctattctagataaccaggcggtggcagtgaagagaatcattatcgagacgaagctttctcctaaggccgtgtatgagctactgaaggacagatgggatgacctgacagaggccggagtcagtgacatgaagctggggaaggaagggcctccagaggtcaatgaggaccgcttcagcctgccgctcatcatcaccatcgtctgcatggcatccttcctgctccttgttgctgccctctacggctgctgtcaccagcggatctcccagaggaaggaccagcaacggctcacagaggagctgcagacagtggagaatggttaccatgacaacccaaccttggaagtgatggagactccttctgagatgcaggagaagaaggtggtcaaccttaatggggagctgggggacagttggatcgtccctctggacaacttgaccaaggatgacctagatgaggaggaagacacacacctctgatctgtctgctggccaccccaactgcactgcagagctccagaccacccaaagtgccatttggacagggagggggaaatcttcccacctgaagacagaaagactggggagggagaatggactccgaaggttgtctccctcctcacaatccctacagggccttaattttccttttcaagttcaacaaagtcacattctgtctagttccctcatgtaaaataacctacttgtgcctgagcccagagcaggaaggcaggaggaagatggagaacgccatgcgagtctctggagctcctccaggaacggcaccctctcatctcataactgaggccttaagaggtcaggtgacttgcacggggccacacagccctttggtgacaaaggttgtttccctcagtctggtgcttaattgcatccagacacactactgtgttcatctgtgcccattccccaaggcacaagacacttgcaggtgggcaggctggaaaagaaaaccaagcctctatggtctcaaggacaggtccccaatttccatctcctataacatggcctcggctagcttgttgtatcccacctctcatgagttagtctttagtcccattatttcccagggcatggctttgaacttcttgttctacattctgatttccttgcctttcttagtgggattgggactaaactcacaggcctcactatctaatggagtctgcctaaggggtgggtgggcaggcaaaggcatctcatgctctgatggcttccccaatagcttcctcatggcagctgattctgtactgagactggcctatcatttaagacactccctagaagacacttctcaaaaatctcctctggccgtctgcttctgctccttttttgttgttcactgctcagctgagtgggtgactcctcaaaacctagtgtcacatagcagttgtctaggaacagatatgtcctggggtcccaactggtccctgattggcaaatgtgtctcagtagacaatcgatctaacctaccaggcattattattattccacaggaagctcagggacttttcaagttgctgagagcttgggttggtgtgctgtggtgtgttgtgtgtgtgtgcgccagctccttactgccaaaggccaaagctcagatcgtggagactgtgagctaattccatcggtttgcaccctcctttgccacatggagaaaggcccagattgtgcagttttaagataccttggcctactctcccagcacggagccaggcttttgtgtctggtgtgctttgtggcattccagctgtcccatttctgatggcctctcagggaacataaaaccatgcctagtacctagcacaggatttgtccaggctcagcggtgtcaggcagccatgtccaaggttgcgagggcccagcatagtgatgatgggtttcctgagaaaggggaaggggccctgtgtggagctttgaattaggcccatggtttgtattcttgtggtataagttcccaggactgtctggtttggagcagcttatttgaaaggggagctaggggggcagacaggtgtcctctgcctgagtccatctttaccactgtctctctgagatacagactagagagaaagaaaaggctgacagaagtcagggaaggctcctagtgagtttcacaggagcttgaaaaaaaggctaagaagaactcaacaagccccttggcatgcttctctaaggtttgcaggggagtgtggggaacagtgccaactggggggggggggggaattaggtctgtttgatccctgcattaggttctgccacccagtgggttcattctgtcatggtccgagaggcagacaggatttcttcttctcaatggggcaaggccatttgacagaccgcaaatgctttttctgcaaactggtcacagatttcaaccctacagtctgtcagctatgattgtaatattagacaacagatagtgtgtctgggctggaggaacagccatggctctgaccagactggcccagtgttccttcttgtgcactcaaattgtgtagccttttattacctggccttcacttgctcttacggctgggacatctgttcagcaagacatgctgctagcatctataaaagtcatcttcctgtggttatgaccgggtttttagagctgttaactcagaatctcaggcccagtcagagaaaagggagaggaagggaactttagagccagctgtaccaaagagaaaccagagctcttcatttcagtggcaaatggttctcccctagctgcaaaccccaagggcccgatggctgtgcctgagcacacccagcagctcttgtgctcccacgtgcatgtcaagagaggcaggtgagcatggggcactgagcagtctgcccggcagaaaaggacccagactcatctaggacactcacttctatcttccctgatagagtgagccagcccactctatcagtgtttgagttctattggtctttgcctattttttggacaatacactggtgaaactttggagagtaagttgaagttgacaagatctatgcatatttttgacaatgtaaatacaagagccacatgtttatttaccttgtactactttcagagagtaaacttggggtaaagatttgatagctatgagagatagctaagcctccctccccacttctgaacaagaatgtaaatgtctatttagtagagatgacttttttaaaaatgaagaaagtaacaagacaggctggtaacaaacgtatttgccttggagatagtggatttacacctcccctgccaagtcgcagtcctactgcagttcaggctggagttgagaatggtctgtgatggtcacggggaaaggtttggagatacagtctagtctccctacaggaaatcacatctgaagacacaaagagtctccccagggacagggacaagaggaaaacacgcatcccacactgcccaccctgtgctgcgtgtttctcaagaacagggaattaaggactgcaacttctaggtacaaggttataggagaccgccagccttcctcacgatgaccctggaggggctgggagaacacaagggacaatagcagccatatttggggctctggaatcatgtggtccgaggtgtaaataagcattctaggggcttgggtttttgtttttgttttcctgtcaggaattaattttgaaaactccttgaggaatgtccagcagaatgaggctcaaagggactgcatagatgaaggcagagggggagaagccctgtgtagaacagcctgtgtcaccgtcaggtgtctgatgcttccctcggtctgccgcaaacccaccactggccaggatcactgttttgtgggggcctttctgtttgtgaatgtcaaccagcttgcccaggagattgggggagtgtatgttgtagtggacaggggtctaaagtacactggaatttattgagagattatagttaactattgcattttcttataaagtctattttggaaaattgtacactgtcaataaaaatgcttttgtgt

SEQ ID NO: 1850 - protein, 503 aa, Mus musculus
MPPTTALSALLLLLLSPASHSHNGNETSTSAIKSSTVQSHQSATTSTEVTTGHPVASTLASTQPSNPTPFTTSTQSPSMPTSTPNPTSNQSGGNLTSSVSEVDKTKTSSPSSTAFTSSSGQTASSGGKSGDSFTTAPTTTLGLINVSSQPTDLNTTSKLLSTPTTDNTTSPQQPVDSSPSTASHPVGQHTPAAVPSSSGSTPSTDNSTLTWKPTTHKPLGTSEATQPLTSQTPGITTLPVSTLQQSMASTVGTTTEEFTHLISNGTPVAPPGPSTPSPIWAFGNYQLNCEPPIRPDEELLILNLTRASLCERSPLDEKEKLVELLCHSVKASFKPAEDLCTLHVAPILDNQAVAVKRIIIETKLSPKAVYELLKDRWDDLTEAGVSDMKLGKEGPPEVNEDRFSLPLIITIVCMASFLLLVAALYGCCHQRISQRKDQQRLTEELQTVENGYHDNPTLEVMETPSEMQEKKVVNLNGELGDSWIVPLDNLTKDDLDEEEDTHL

SEQ ID NO: 1851 - DNA, 1661 bp, Mus musculus
cggggcgggagtcttcgcagcaacgtgcgcggggccgcagcggcgcagacaccgcccgggccgcagacaccttcgctcgtcgctgctggctccgtgtcccagcccagctctgcggtaggcaggaggagcggccggatcgcgactccggagttcgcggccgtcgccaggcctcccggagcggcgccgacgctcccgctgtccggacgcgcgaccctgcgccagcgccgcagccacctgctcggagtccccgggcgagcacaaccatgcctcccactacggcgctctccgcgctgctgctgctgctactgtcgcctgcatctcactcccataatggaaatgagactagcacatctgctatcaaatctagcactgtccagagccaccaaagtgccacaacatcaacagaagtcacaactggtcacccagtggcatctacacttgcttcaacccagccaagcaaccctacaccattcacaacctcaacccaatctccatctatgccgacctccaccccaaaccccacgagcaatcaaagcggtggcaatctgacttccagtgtctccgaggtggacaagactaaaacaagctctcccagtagcacggccttcaccagtagcagtggacaaacagcctcctctggaggcaagagcggtgacagttttaccacagccccaacaaccactttggggctaatcaacgtctcttctcagcctactgaccttaataccacctcaaagcttctttctacccccacaacagacaacacaacaagccctcagcagcctgtggattcttcaccgagcacagcgagccatcctgtggggcagcatacccctgctgctgttcccagcagctctggctccacgcccagcactgacaactctacactgacatggaagcccactacacacaaaccattgggcacctctgaagccactcagcccctcaccagccagacaccaggcatcactacattgcccgtctccacactgcaacagtctatggcgtctacagtgggaactacgactgaagagttcacacacctcatctctaatgggactcccgtggcccctccaggccccagcacaccctctcccatctgggcctttggaaattaccagctaaactgtgaacctcccataaggccagatgaggaactccttattctgaacctcacaagagccagcctttgcgaaaggagccctctggatgagaaagagaaactcgtggaactgctgtgtcactcagtcaaagcgtccttcaagccagctgaggatttgtgcactctacatgtggcccctattctagataaccaggcggtggcagtgaagagaatcattatcgagacgaagctttctcctaaggccgtgtatgagctactgaaggacagatgggatgacctgacagaggccggagtcagtgacatgaagctggggaaggaagggcctccagaggtcaatgaggaccgcttcagcctgccgctcatcatcaccatcgtctgcatggcatccttcctgctccttgttgctgccctctacggctgctgtcaccagcggatctcccagaggaaggaccagaaaaacagaggtttttatggagagggatggagaagagaaaaaagatctcaaggacaaaatgtcttcagaaatctctctccatga

SEQ ID NO: 1852 - protein, 465 aa, Mus musculus
MPPTTALSALLLLLLSPASHSHNGNETSTSAIKSSTVQSHQSATTSTEVTTGHPVASTLASTQPSNPTPFTTSTQSPSMPTSTPNPTSNQSGGNLTSSVSEVDKTKTSSPSSTAFTSSSGQTASSGGKSGDSFTTAPTTTLGLINVSSQPTDLNTTSKLLSTPTTDNTTSPQQPVDSSPSTASHPVGQHTPAAVPSSSGSTPSTDNSTLTWKPTTHKPLGTSEATQPLTSQTPGITTLPVSTLQQSMASTVGTTTEEFTHLISNGTPVAPPGPSTPSPIWAFGNYQLNCEPPIRPDEELLILNLTRASLCERSPLDEKEKLVELLCHSVKASFKPAEDLCTLHVAPILDNQAVAVKRIIIETKLSPKAVYELLKDRWDDLTEAGVSDMKLGKEGPPEVNEDRFSLPLIITIVCMASFLLLVAALYGCCHQRISQRKDQKNRGFYGEGWRREKRSQGQNVFRNLSP

SEQ ID NO: 1853 - DNA, 5097 bp, Mus musculus
ccgcggagggttgtctgcctgcggagctcgggcagctccttccgcacgccgacccctgcctcccgtggcaaccgctgtagctgtggcgcagagcctcgcccactgccatccccaccctctccatccttagccattaaacaacgccggctccaagcacgttctagcaggactcgggcacagaagaggagagcgatccatccgggggcacaggacgacctgccaggcgacatgcggccgcccggagccgcccgggcgcccgaagtctgaggctgccagccgggactggtcattgtaagcgccacggagaactgctggcgctgccgttccctccccggtccctggtcgcgccgcgatggggcacctgcctaggggaacgctcgggggccgccgcctgctacctctgctcgggctctttgtgctgctcaaggtagggtcccccattccacgtggctgtgcaagatgacaacaatatcgttgtgtctttagaagcttctgatatagtcagcccagcatctgtgtatgttgtgagggtagctggcgaatcaaaaaactatttcttcgaatttgaggaatttaacagcacattgcctcctcctgtggtctttaaggccacatatcacggtctttattacataatcactctggtggtagtcaacgggaatgtggtcaccaaaccatccagatcaatcaccgtgttgacaaaacccttgcctgtaaccagtgtgtctatctatgactataaaccttctcctgagacaggagtcctgtttgaaatccattatccggaaaaatacaatgtgttcagcagagtgaacatcagctactgggaagggagggacttcaggacgatgctgtacaaagatttctttaaggggaaaacggtgtttaatcactggctaccaggactatgttacagtaacatcactttccagctggtatcggaggcaacttttaataaaagtacccttgtggagtacagtggtgtgagccatgaacccaaacagcacagaacagcaccatatccacctcgaaacatctctgttcgctttgtcaacttgaacaagaacaactgggaggagccgagcgggagcttccccgaggactcgttcatcaaaccaccgcaagattcaataggaagagacagacgcttccatttccccgaagaaactccggagactccccccagcaatgtgtcctccggttctccccccagcaatgtgtcctccgcttggcctgacccgaatagcacagactatgaaagcacatcacagcccttctggtgggacagtgcatccgcggcccctgaaaacgaggaggactttgtcagtgcgctgccagcagactatgacactgagaccacactcgataggacagagaagcccacagccgaccctttctctgccttccctgtgcagatgactctgagctggttaccacccaaaccgcccacagcctttgatggcttcaatatcctcatagagagggaagagaactttactgactatttgacagtggatgaagaagcccatgaattcgttgcagaactgaaggagcctgggaaatacaaactctcagtgacaacctttagctcctcgggggcctgtgagactcggaaaagccagtcagcaaaatcgctcagcttctacatcagccccacaggcgagtggattgaagaactgaccgagaaacctcagcatgtgagtgtccacgtcttaagctcaaccaccgccttgatgtcgtggacatcttctcaggagaactacaacagcaccattgtgtctgtggtgtccttgacctgccagaaacagaaggagagccagcggctggagaagcagtattgtacccaggtgaactcaagcaaacctgtaattgagaacctggttcctggtgcccagtaccaggttgtgatgtacttaagaaaaggccctttgattgggccaccttccgatcctgtgacatttgcgattgttcccactgggatcaaagatttaatgctctaccccttgggtcccactgctgtcgtgctgagctggacccgacctatcctgggagtcttcagaaaatacgtggttgaaatgttctacttcaaccccaccaccatgacctcagagtggacgacctactatgagatagcagccacagtttccttaacggcatccgtgagaatagcaagcctattgccagcgtggtactacaacttccgcgtaaccatggtgacatggggagatccagagctgagctgttgtgacagttccaccatcagcttcataacagcccccgttgctccagaaatcacgtctgtggagtacttcaacagcctgctgtacatcagttggacctatggggatgccaccactgacctgtcccactctagaatgctgcactggatggtcgttgcagaagggaggaagaaaattaaaaagagtgtgacacgcaatgtcatgacggccatccttagcctgcctccaggagatatctacaatctgtctgtcacggcctgcactgagagagggagcaacacctccttgccccgccttgtcaagctcgaaccagcccctccgaagtcactcttcgcagtgaacaaaacacagacgtcagtgaccctgctgtgggttgaggagggtgttgctgatttctttgaagtcttctgtcagcagctcggctctggccacaatggcaaactccaggagccagtagctgtgtcgtcccacgtggtgaccatctccagcctcctcccagccactgcctacaactgcagtgtcaccagcttcagccacgacactcccagtgtccctacattcatagctgtctccacaatggttacagaggtgaaccctaacgtggtggtgatctcggtgctggccatcctcagcacacttttaattggactgctcttagtgacccttgtcattctccgaaagaagcacctgcagatggctagggaatgtggagctggcacgtttgttaactttgcatccttagaaagggaagggaaactcccctacagttggagtaaaaatggcttaaagaagaggaaactaacaaaccccgttcagctggatgacttcgattcttacatcaaggatatggccaaggactcggactataaattctctcttcagtttgaggagttgaagttgattggactggatattccgcactttgctgcagatctaccgctgaaccgatgtaaaaaccgctacacaaacatcctgccgtatgactttagccgggtgaggctagtctccatgaacgaagaggaaggagcagactacattaatgccaactatattcctggatacaactcaccccaggagtacattgccacccagggtcccctgccagaaaccagaaatgacttctggaagatggtcctacaacagaagtcccacatcatcgtcatgctcactcaatgcaatgagaaaaggagggtaaaatgtgaccactactggccattcacagaagaacccattgcttatggggacatcaccgtggagatggtctctgaggaagaggaggaggactgggccagtagacacttccggatcaactatgcggacgaagcgcaggacgtgatgcattttaactacacagcctggcccgatcacggcgtgcctccagcaaacgccgccgagagcatcctgcagtttgtgttcacagtgcgacagcaagccgccaagagcaaagggcccatgatcatccactgcagtgcgggtgtgggacggacaggaaccttcattgccctggacaggctcctgcaacacattcgagatcatgaatttgtggacatcttagggctggtatcagagatgcgctcataccgaatgtcaatggtacagacagaggagcagtacatttttatccatcagtgtgtgcagctgatgtggctgaggaagaagcaacagttctgcatcagcgacgtcatctacgagaacgtcagcaaatcctagttcggaatctggagcggtgaggacatgatacctgcgcatcctcccttgcttccagagtttttataggggcttttagtcactttgctaaatcgagtccctgctgtgcagtatatggacaaggaggagatttacctcctagaaccaagaagaccttaaggagcctacagtatcatttggagtcttttcacttctagatgtttgatggaccaaattcagtagaattccagaaaggtcaccaatgctccttgaggggcaggaagcgcaatacttcctgatggctcagttggctctttgctgctcgggttgggttgattttttttttaagtgcaataatttctgtataattgtgattttttacattcacaattcagaatgttgaattgttatctgcccacaccatcgatcagtgccacagccttggaaataaccaacatcattacggagttttatctcatccctggaaaggcatggctacacaggaagacgtggtgatgaatctccttcaaagaaactgagcgagtgtgctcctcgctccaaccttgaagctacgggtcaggagtaggcaggcagagggaagagagcggttctactcacccatcagccagcttatcttttcctatttcaaatatgaaaacctgtgtttcaaagtagagtaggaaaaacattatatgtctgacttgtcatagtgggtttcttccttgttgacagttgggagtttcttccgtggctcttttgaactaatgtcacggtcctttttgaacagccagagttgattcaacagttttgagtctgactctgaactctgagatatcttggtgcctagccttcacgtttatttttctctgtgtccacctgtgtacacaaaaacagtttctccaagagctataggctgtaaaaatgcactttctttctccacccagaggagctgggaattcagaagtcacgacaacaacaaactcagcatgtaaggacaggtattggacaccatcccttaagaacattgttgagtgtctctatggattccgacaggagattctctgggtcttctttgcatttctgttgtcagagtcattttaacctgtgtagctagtggcattatattctttggattttgtatgattaaagtacatgattgtgtgttgtgacc

SEQ ID NO: 1854 - protein, 37 aa, Mus musculus
WPDHGVPPANAAESILQFVFTVRQQAAKSKGPMIIHC

SEQ ID NO: 1855 - DNA, 5052 bp, Mus musculus
cattaaacaacgccggctccaagcacgttctagcaggactcgggcacagaagaggagagcgatccatccgggggcacaggacgacctgccaggcgacatgcggccgcccggagccgcccgggcgcccgaagtctgaggctgccagccgggactggtcattgtaagcgccacggagaactgctggcgctgccgttccctccccggtccctggtcgcgccgcgatggggcacctgcctaggggaacgctcgggggccgccgcctgctacctctgctcgggctctttgtgctgctcaagattgttacgacgttccacgtggctgtgcaagatgacaacaatatcgttgtgtctttagaagcttctgatatagtcagcccagcatctgtgtatgttgtgagggtagctggcgaatcaaaaaactatttcttcgaatttgaggaatttaacagcacattgcctcctcctgtggtctttaaggccacatatcacggtctttattacataatcactctggtggtagtcaacgggaatgtggtcaccaaaccatccagatcaatcaccgtgttgacaaaacccttgcctgtaaccagtgtgtctatctatgactataaaccttctcctgagacaggagtcctgtttgaaatccattatccggaaaaatacaatgtgttcagcagagtgaacatcagctactgggaagggagggacttcaggacgatgctgtacaaagatttctttaaggggaaaacggtgtttaatcactggctaccaggactatgttacagtaacatcactttccagctggtatcggaggcaacttttaataaaagtacccttgtggagtacagtggtgtgagccatgaacccaaacagcacagaacagcaccatatccacctcgaaacatctctgttcgctttgtcaacttgaacaagaacaactgggaggagccgagcgggagcttccccgaggactcgttcatcaaaccaccgcaagattcaataggaagagacagacgcttccatttccccgaagaaactccggagactccccccagcaatgtgtcctccggttctccccccagcaatgtgtcctccgcttggcctgacccgaatagcacagactatgaaagcacatcacagcccttctggtgggacagtgcatccgcggcccctgaaaacgaggaggactttgtcagtgcgctgccagcagactatgacactgagaccacactcgataggacagagaagcccacagccgaccctttctctgccttccctgtgcagatgactctgagctggttaccacccaaaccgcccacagcctttgatggcttcaatatcctcatagagagggaagagaactttactgactatttgacagtggatgaagaagcccatgaattcgttgcagaactgaaggagcctgggaaatacaaactctcagtgacaacctttagctcctcgggggcctgtgagactcggaaaagccagtcagcaaaatcgctcagcttctacatcagccccacaggcgagtggattgaagaactgaccgagaaacctcagcatgtgagtgtccacgtcttaagctcaaccaccgccttgatgtcgtggacatcttctcaggagaactacaacagcaccattgtgtctgtggtgtccttgacctgccagaaacagaaggagagccagcggctggagaagcagtattgtacccaggtgaactcaagcaaacctgtaattgagaacctggttcctggtgcccagtaccaggttgtgatgtacttaagaaaaggccctttgattgggccaccttccgatcctgtgacatttgcgattgttcccactgggatcaaagatttaatgctctaccccttgggtcccactgctgtcgtgctgagctggacccgacctatcctgggagtcttcagaaaatacgtggttgaaatgttctacttcaaccccaccaccatgacctcagagtggacgacctactatgagatagcagccacagtttccttaacggcatccgtgagaatagcaagcctattgccagcgtggtactacaacttccgcgtaaccatggtgacatggggagatccagagctgagctgttgtgacagttccaccatcagcttcataacagcccccgttgctccagaaatcacgtctgtggagtacttcaacagcctgctgtacatcagttggacctatggggatgccaccactgacctgtcccactctagaatgctgcactggatggtcgttgcagaagggaggaagaaaattaaaaagagtgtgacacgcaatgtcatgacggccatccttagcctgcctccaggagatatctacaatctgtctgtcacggcctgcactgagagagggagcaacacctccttgccccgccttgtcaagctcgaaccagcccctccgaagtcactcttcgcagtgaacaaaacacagacgtcagtgaccctgctgtgggttgaggagggtgttgctgatttctttgaagtcttctgtcagcagctcggctctggccacaatggcaaactccaggagccagtagctgtgtcgtcccacgtggtgaccatctccagcctcctcccagccactgcctacaactgcagtgtcaccagcttcagccacgacactcccagtgtccctacattcatagctgtctccacaatggttacagaggtgaaccctaacgtggtggtgatctcggtgctggccatcctcagcacacttttaattggactgctcttagtgacccttgtcattctccgaaagaagcacctgcagatggctagggaatgtggagctggcacgtttgttaactttgcatccttagaaagggaagggaaactcccctacagttggcgtaggagtgtgtttgctctcttaaccctgctgccttcatgtctttggactgactatcttttggcattttatattaacccttggagtaaaaatggcttaaagaagaggaaactaacaaaccccgttcagctggatgacttcgattcttacatcaaggatatggccaaggactcggactataaattctctcttcagtttgaggagttgaagttgattggactggatattccgcactttgctgcagatctaccgctgaaccgatgtaaaaaccgctacacaaacatcctgccgtatgactttagccgggtgaggctagtctccatgaacgaagaggaaggagcagactacattaatgccaactatattcctggatacaactcaccccaggagtacattgccacccagggtcccctgccagaaaccagaaatgacttctggaagatggtcctacaacagaagtcccacatcatcgtcatgctcactcaatgcaatgagaaaaggagggtaaaatgtgaccactactggccattcacagaagaacccattgcttatggggacatcaccgtggagatggtctctgaggaagaggaggaggactgggccagtagacacttccggatcaactatgcggacgaagcgcaggacgtgatgcattttaactacacagcctggcccgatcacggcgtgcctccagcaaacgccgccgagagcatcctgcagtttgtgttcacagtgcgacagcaagccgccaagagcaaagggcccatgatcatccactgcagtgcgggtgtgggacggacaggaaccttcattgccctggacaggctcctgcaacacattcgagatcatgaatttgtggacatcttagggctggtatcagagatgcgctcataccgaatgtcaatggtacagacagaggagcagtacatttttatccatcagtgtgtgcagctgatgtggctgaggaagaagcaacagttctgcatcagcgacgtcatctacgagaacgtcagcaaatcctagttcggaatctggagcggtgaggacatgatacctgcgcatcctcccttgcttccagagtttttataggggcttttagtcactttgctaaatcgagtccctgctgtgcagtatatggacaaggaggagatttacctcctagaaccaagaagaccttaaggagcctacagtatcatttggagtcttttcacttctagatgtttgatggaccaaattcagtagaattccagaaaggtcaccaatgctccttgaggggcaggaagcgcaatacttcctgatggctcagttggctctttgctgctcgggttgggttgattttttttttaagtgcaataatttctgtataattgtgattttttacattcacaattcagaatgttgaattgttatctgcccacaccatcgatcagtgccacagccttggaaataaccaacatcattacggagttttatctcatccctggaaaggcatggctacacaggaagacgtggtgatgaatctccttcaaagaaactgagcgagtgtgctcctcgctccaaccttgaagctacgggtcaggagtaggcaggcagagggaagagagcggttctactcacccatcagccagcttatcttttcctatttcaaatatgaaaacctgtgtttcaaagtagagtaggaaaaacattatatgtctgacttgtcatagtgggtttcttccttgttgacagttgggagtttcttccgtggctcttttgaactaatgtcacggtcctttttgaacagccagagttgattcaacagttttgagtctgactctgaactctgagatatcttggtgcctagccttcacgtttatttttctctgtgtccacctgtgtacacaaaaacagtttctccaagagctataggctgtaaaaatgcactttctttctccacccagaggagctgggaattcagaagtcacgacaacaacaaactcagcatgtaaggacaggtattggacaccatcccttaagaacattgttgagtgtctctatggattccgacaggagattctctgggtcttctttgcatttctgttgtcagagtcattttaacctgtgtagctagtggcattatattctttggattttgtatgattaaagtacatgattgtgtgttgtgaccatg

SEQ ID NO: 1856 - protein, 1226 aa, Mus musculus
MGHLPRGTLGGRRLLPLLGLFVLLKIVTTFHVAVQDDNNIVVSLEASDIVSPASVYVVRVAGESKNYFFEFEEFNSTLPPPVVFKATYHGLYYIITLVVVNGNVVTKPSRSITVLTKPLPVTSVSIYDYKPSPETGVLFEIHYPEKYNVFSRVNISYWEGRDFRTMLYKDFFKGKTVFNHWLPGLCYSNITFQLVSEATFNKSTLVEYSGVSHEPKQHRTAPYPPRNISVRFVNLNKNNWEEPSGSFPEDSFIKPPQDSIGRDRRFHFPEETPETPPSNVSSGSPPSNVSSAWPDPNSTDYESTSQPFWWDSASAAPENEEDFVSALPADYDTETTLDRTEKPTADPFSAFPVQMTLSWLPPKPPTAFDGFNILIEREENFTDYLTVDEEAHEFVAELKEPGKYKLSVTTFSSSGACETRKSQSAKSLSFYISPTGEWIEELTEKPQHVSVHVLSSTTALMSWTSSQENYNSTIVSVVSLTCQKQKESQRLEKQYCTQVNSSKPVIENLVPGAQYQVVMYLRKGPLIGPPSDPVTFAIVPTGIKDLMLYPLGPTAVVLSWTRPILGVFRKYVVEMFYFNPTTMTSEWTTYYEIAATVSLTASVRIASLLPAWYYNFRVTMVTWGDPELSCCDSSTISFITAPVAPEITSVEYFNSLLYISWTYGDATTDLSHSRMLHWMVVAEGRKKIKKSVTRNVMTAILSLPPGDIYNLSVTACTERGSNTSLPRLVKLEPAPPKSLFAVNKTQTSVTLLWVEEGVADFFEVFCQQLGSGHNGKLQEPVAVSSHVVTISSLLPATAYNCSVTSFSHDTPSVPTFIAVSTMVTEVNPNVVVISVLAILSTLLIGLLLVTLVILRKKHLQMARECGAGTFVNFASLEREGKLPYSWRRSVFALLTLLPSCLWTDYLLAFYINPWSKNGLKKRKLTNPVQLDDFDSYIKDMAKDSDYKFSLQFEELKLIGLDIPHFAADLPLNRCKNRYTNILPYDFSRVRLVSMNEEEGADYINANYIPGYNSPQEYIATQGPLPETRNDFWKMVLQQKSHIIVMLTQCNEKRRVKCDHYWPFTEEPIAYGDITVEMVSEEEEEDWASRHFRINYADEAQDVMHFNYTAWPDHGVPPANAAESILQFVFTVRQQAAKSKGPMIIHCSAGVGRTGTFIALDRLLQHIRDHEFVDILGLVSEMRSYRMSMVQTEEQYIFIHQCVQLMWLRKKQQFCISDVIYENVSKS

SEQ ID NO: 1857 - DNA, 4637 bp, Mus musculus
agaatgaggattcacactgggtccaagcaatgctcagtgctgtggctgactgctttgggttcgtgaacctgctggacttagagcagccggtgctctttgagtacctgtgagtgggtgagagggaggtgatagtaaagaaaaacagagagaagagaagggggcatttttaaggtcttggggttagagctcagagaaagaactgttaacgggggagaaagggggagaaaagggcagaaaaggcgatgccgggacagaaagactgcgacagtcacagacaatggtaggaagataagagaaagaaggaagggagggagggagggagggaagagagaagggcgagttagaaagagattgaaagaacagaaaagcagggcacacagagagaggctcagggaagacagcaacaaacaagctgctggtgatgggagctaaggaagccacagtcagaggccccggggcaagcccagtgcacagaacttgccacctgattcccctgctgctcgcgggaatgctgaccacaggcctggcccagtcgccagtccccacctcagcacctcgaggcttctgggctctatctgaaaacctgactgtggtggaagggtcgacagttaagctgtggtgtggcgtcagggcccccggcagtgtggtgcagtgggctaaggatgggctgcttctgggtccaaaccctaagattccaggcttcccaaggtacagcctggaaggagacagtgctaaaggtgagttccacctgcttattgaagcctgtgacctcagcgatgatgcggagtacgagtgccaagtcggccgctccgagttgggtcccgagctcgtgtctcccagcgtaatcctctccatcctagtttcccccaaggtgcttcagttaacccctgaggcaggaagcacagttacctgggtagctggacaggaatatgtggtcacctgtgtgtctggggatgcaaagccagcacctgacatcatcttcatccagggtggacgcacggtagaggatgtctcctccagcgtgaatgagggatcagaggagaaactcttcttcacggaagccgaagccagggtgacaccccagagctcagataatgggcagctgctagtctgcgaggggtccaacccagccttggccactcccataaaggcttcgttcaccatgaatatcctgttccccccaggacctcctgtcattgattggccaggcctgaatgaggggcatgtacgggcaggggagaacctggagctaccctgcatagccagaggtggaaatccacctgcgaccctgcagtggctgaagaatggtaaaccagtgtccatagcttggggcacagagcatgcccaggcagtggctcacagtgtgctggtgatgaccgttcgacctgaagaccacggagctcggctcagctgtcagtcctacaacagtgtgtctgcagagacccaggagcgaagcatcactctgcaggtcacctttccccccagtgccgttaccatcctgggatctacatcacagtctgagaacaaaaatgtgaccctttgctgccttaccaagtccagtcgcccacgggtcctgctgcgatggtggttgggtggacggcagttgctgcccacggatgagacagtcatggatggcctgcatggtggccacatctccatgtccaatctgacactcttggtgaagagagaagacaatggcctgtccctcacctgcgaagccttcagtgatgccttcagcaaggagaccttcaagaagtcactcaccttgaatgtaaaatacccggcccagaagctgtggattgagggacccccagaggggcagagcatccggactggaactcgggtgaggctggtatgcttggccattggaggcaacccagagccctccctcacctggcttaaggattcgcgcccggtgaacgatcctcggcagtctcaggagccccggcgtgtgcagctgggcagtgtggagaagtccggcagcactttctcccgcgagctggtgctgatcataggcccgccggacaacctagccaagttctcctgcaaggcgggtcagctcagtgcgtctacgcagctggtggtgcagttccccccaacaaacctgaccatcctggccaactcgtccgcactgcgcccaggcgacgccttgaacttgacctgcgtcagcatcagcagcaaccctccagttaacttgtctttggacaaggaaggagagaggctggacgacgtggctgcaaaaccccagagcgccccattcaaaggctccgctgcatccaggagtgtttttcttcgggtgtcatcccgagaccacggtcaccgggttacctgccgggcccacagcgaggcacttcgtgaaaccgtgagctctttctaccgcctcaacgtgttataccctccagagttcctgggagagcaagtgcgggcagtgaccgtggtggagcagggccaggcactgctgcctgtgtccgtgtctgctaaccccgcccccgaggccttcaactggaccttccgaggctaccgcctcagcccagctgggggtccccggcaccgcatcctgtctggaggggcactgcagctgtggaatgtaacccgagctgacgatggcttttatcagctacactgccagaactcggagggcaccgccgaggcgctgttgaagctggacgtgcattatgctcccaccatccgtgccctgaaggaccctactgaggtgaatgttgggggttctgtggatatagtctgcaccgtcgatgccaatcccatcctcccagagatgttcagctgggagagactgggggaagacgaggaggaactgaacctggacgacatggagaagatgtcaaagggatccacagggcgtctgcggattcgccaggccaagctgtcccaggctggcgcttaccagtgcatcgtggacaacggggtggctcccgcagccagaggactggttcgtcttgttgtccgatttgccccccaggtggatcatcctactcccctgacgaaagtggctgctgctggggacagcaccagctcagccacactccactgccgtgcccggggggtccccaacatcgacttcacttggaccaaaaatggggtccctctggatctccaagaccccaggtacacagagcacaagtaccaccagggtgtggtccacagcagcctcctgaccattgctaatgtgtctgcagcccaggactatgccctcttcaaatgcacagccaccaatgcccttggttcagaccacaccaacatccagctcgtcagcatcagccgtcctgaccctccactggggctgaaggttgtgagcgtgagccctcactcggtaggactggagtggaaacctggctttgatgggggtctgcctcagaggttccaaatcaggtatgaggccctcgagagcccaggattcctctacatggatgtcctgcctgcacaggccaccaccttcacactgactgggctgaagccttctacacggtacaggatctggctgttggccagcaatgccctgggggacagtggattgacggacaaggggatccaggtctccatcactaccccaggcctggaccaggctcctgaagacacagaccagccgctgcccacagagcagcctccgggcaagggttggggattcaccaaggggcatcttctactcccaggacccccgaggctgcccctgctgcctgtgctctttgcggttggtggtcttctgttgctttccaatgcctcctgtgttgggggactcctctggcggagaagactgaggcgccttgctgaggagatctcagagaagacagaggcagggtcggaggaggatcgaatcaggaatgaatatgaggagagtcagtggactggggaccgggacacaagaagctccacggttagcacagcagaagtggacccacactactactccatgagggacttcagtccccagcttcccccaacactggaagaggtgtcatatcgccaagccttcacaggtattgaagatgaggacatggccttccccggacacctgtatgacgaggtggagagagtctatggcccacctggggtctggggacccctctatgatgaagtacaaatggacccctatgaccttcgctggcctgaggtcaaatatgaggacccaaggggaatctacgaccaggtggcggcagacatggatgctggggagcctggttctctgccctttgagctgaggggacatctggtgtgagactcttcacgacacctgtttcctacagccttggagaagacctgaggaaatccgtacaaatgacaagaagactccagctgacatctgggatgaccaagactcctttcattgtaatggggcttctcccaagagacacaatcatttggaaatgacatttgaacaatgaaaatctatttagggatcattatacttttcaaaagtaaaaattttagaagtaggaaagatctattaaaaatcctattccaaggggctggagagatggctcagtggttaagagcactgactgctcttccagaggtcctgagttcaattcccagcaaccacatggtggctcacaaccatccttaatgagatatgatgcccatttctggtgtgtctgaagacagttacagtatactcatat

SEQ ID NO: 1858 - protein, 1270 aa, Mus musculus
MGAKEATVRGPGASPVHRTCHLIPLLLAGMLTTGLAQSPVPTSAPRGFWALSENLTVVEGSTVKLWCGVRAPGSVVQWAKDGLLLGPNPKIPGFPRYSLEGDSAKGEFHLLIEACDLSDDAEYECQVGRSELGPELVSPSVILSILVSPKVLQLTPEAGSTVTWVAGQEYVVTCVSGDAKPAPDIIFIQGGRTVEDVSSSVNEGSEEKLFFTEAEARVTPQSSDNGQLLVCEGSNPALATPIKASFTMNILFPPGPPVIDWPGLNEGHVRAGENLELPCIARGGNPPATLQWLKNGKPVSIAWGTEHAQAVAHSVLVMTVRPEDHGARLSCQSYNSVSAETQERSITLQVTFPPSAVTILGSTSQSENKNVTLCCLTKSSRPRVLLRWWLGGRQLLPTDETVMDGLHGGHISMSNLTLLVKREDNGLSLTCEAFSDAFSKETFKKSLTLNVKYPAQKLWIEGPPEGQSIRTGTRVRLVCLAIGGNPEPSLTWLKDSRPVNDPRQSQEPRRVQLGSVEKSGSTFSRELVLIIGPPDNLAKFSCKAGQLSASTQLVVQFPPTNLTILANSSALRPGDALNLTCVSISSNPPVNLSLDKEGERLDDVAAKPQSAPFKGSAASRSVFLRVSSRDHGHRVTCRAHSEALRETVSSFYRLNVLYPPEFLGEQVRAVTVVEQGQALLPVSVSANPAPEAFNWTFRGYRLSPAGGPRHRILSGGALQLWNVTRADDGFYQLHCQNSEGTAEALLKLDVHYAPTIRALKDPTEVNVGGSVDIVCTVDANPILPEMFSWERLGEDEEELNLDDMEKMSKGSTGRLRIRQAKLSQAGAYQCIVDNGVAPAARGLVRLVVRFAPQVDHPTPLTKVAAAGDSTSSATLHCRARGVPNIDFTWTKNGVPLDLQDPRYTEHKYHQGVVHSSLLTIANVSAAQDYALFKCTATNALGSDHTNIQLVSISRPDPPLGLKVVSVSPHSVGLEWKPGFDGGLPQRFQIRYEALESPGFLYMDVLPAQATTFTLTGLKPSTRYRIWLLASNALGDSGLTDKGIQVSITTPGLDQAPEDTDQPLPTEQPPGKGWGFTKGHLLLPGPPRLPLLPVLFAVGGLLLLSNASCVGGLLWRRRLRRLAEEISEKTEAGSEEDRIRNEYEESQWTGDRDTRSSTVSTAEVDPHYYSMRDFSPQLPPTLEEVSYRQAFTGIEDEDMAFPGHLYDEVERVYGPPGVWGPLYDEVQMDPYDLRWPEVKYEDPRGIYDQVAADMDAGEPGSLPFELRGHLV

SEQ ID NO: 1859 - DNA, 682 bp, Mus musculus
tcccctgctgctcgcgggaatgctgaccacaggcctggcccagtcgccagtccccacctcagcacctcgaggcttctgggctctatctgaaaacctgactgtggtggaagggtcgacagttaagctgtggtgtggcgtcagggcccccggcagtgtggtgcagtgggctaaggatgggctgcttctgggtccaaaccctaagattccaggcttcccaaggtacagcctggaaggagacagtgctaaaggtgagttccacctgcttattgaagcctgtgacctcagcgatgatgcggagtacgagtgccaagtcggccgctccgagttgggtcccgagctcgtgtctcccagcgtaatcctctccatcctagactctttcccaccagtttcccccaaggtgcttcagttaacccctgaggcaggaagcacagttacctgggtagctggacaggaatatgtggtcacctgtgtgtctggggatgcaaagccagcacctgacatcatcttcatccaggctgggtcctcacccattttctcaaacttgcacaggctggacgacgtggctgcaaaaccccagagcgccccattcaaaggctccgctgcatccaggagtgtttttcttcgggtgtcatcccgagaccacggtcaccgggttacctgccgggcccacagcgaggcactt

SEQ ID NO: 1860 - protein, 198 aa, Mus musculus
ENLTVVEGSTVKLWCGVRAPGSVVQWAKDGLLLGPNPKIPGFPRYSLEGDSAKGEFHLLIEACDLSDDAEYECQVGRSELGPELVSPSVILSILDSFPPVSPKVLQLTPEAGSTVTWVAGQEYVVTCVSGDAKPAPDIIFIQAGSSPIFSNLHRLDDVAAKPQSAPFKGSAASRSVFLRVSSRDHGHRVTCRAHSEAL

SEQ ID NO: 1861 - DNA, 2007 bp, Mus musculus
ggtttttcggctgtggtccagcccgtggccgtcggagtcgtcatgcagtccctgcgtaccacgctcctgtctttgctactgctgctgctagcggctccttccttggcgttgccgtcggggaccggccgctcggccccagctgccaccgtctgtcccgagcactgcgatcccacccgctgcgccccgccgcccacggactgcgagggtggccgcgtccgcgacgcgtgcggctgctgcgaggtgtgcggcgcgctcgagggtgcagcgtgcggcctgcaggagggtccctgcggcgaggggctgcaatgcgtagtgcccttcggggtgccggcctcggccacagtacgacggcgcgcacaggccggcctgtgcgtgtgtgccagcagcgagccggtgtgtggtagcgacgccaagacctacaccaacctgtgccagctgcgcgccgccagccgccgctccgagaagcttcgccagccgccggtcatcgtcctgcagcgcggcgcctgcggccaagggcaggaagatcccaacagtttgcgtcataagtacaactttattgctgatgtggtggagaagatcgccccggctgtggttcacattgaactatatcgcaagcttcctttctcgaagagggaggtgccagtggccagtgggtcaggattcatcgtatcggaggatggactgattgtgacaaatgctcacgtggtcaccaacaaaaaccgggtcaaggttgagctgaagaatggagctacctatgaagccaaaatcaaggatgtggatgaaaaggcggacattgcgcttatcaagattgaccaccagggaaagctgccagtcctgctgctcggccgctcctcagagctgagacctggagaatttgtagttgccattggaagccccttttctcttcaaaacacagtcaccactgggatcgtcagcaccacccagcgaggcggcaaagagctgggacttcggaactccgatatggactacattcagacagacgctatcatcaattatggaaattccggaggcccgttagtaaacctggatggcgaggtgattgggattaacaccttgaaggtgacggcgggcatctccttcgcaattccatccgataagataaaaaagttcttgacagagtcccacgatcgacaggccaaagggaaagctgtcaccaagaagaagtatattgggatccgaatgatgtcgctcacatctagcaaagccaaagagctgaaggaccgtcaccgagacttcccggatgtgctctctggggcatatatcattgaagtcattcctgacaccccggcagaagccggagggctcaaggaaaatgacgtcatcatcagcatcaacggacagtctgtggtcactgccaatgacgtcagcgatgtcatcaaaaaggagaacaccctgaacatggttgtccgcaggggcaatgaagacattgtgattaccgtgattcctgaagaaatcgacccctaggcagaggcaggagccagacttcatgtttccctcaaagactccaggggatggcgcatgagaactgagctggtgacgcaggacacccgggacctttgtccaacattttgcttgttcagggaacacccctgccgacagaatccttcttgatagtttgcgggcaaaacaaatgtaatgttgcaggtgcacaggcagaagtcctgccttctgtatgctatgtatgcagcgtgcttttccttacaagcttgggctgttcctgcttacacagtcaacatttgtcccttcccttagcctaagttgtctgactaatgcagttgacggatgcgtaggcaagaggaaggtcctcgcagccatggtcttgggcgtgtttacacttttcctccgagtcggcactcagaggaatttgatgccccgagaccacaggtgggtgaccctggcttctgagatggccaaaaatgcctcttaggaatcctggaacccggagtacagtgactttgagtttcagctattaaaatacttcttcat

SEQ ID NO: 1862 - protein, 480 aa, Mus musculus
MQSLRTTLLSLLLLLLAAPSLALPSGTGRSAPAATVCPEHCDPTRCAPPPTDCEGGRVRDACGCCEVCGALEGAACGLQEGPCGEGLQCVVPFGVPASATVRRRAQAGLCVCASSEPVCGSDAKTYTNLCQLRAASRRSEKLRQPPVIVLQRGACGQGQEDPNSLRHKYNFIADVVEKIAPAVVHIELYRKLPFSKREVPVASGSGFIVSEDGLIVTNAHVVTNKNRVKVELKNGATYEAKIKDVDEKADIALIKIDHQGKLPVLLLGRSSELRPGEFVVAIGSPFSLQNTVTTGIVSTTQRGGKELGLRNSDMDYIQTDAIINYGNSGGPLVNLDGEVIGINTLKVTAGISFAIPSDKIKKFLTESHDRQAKGKAVTKKKYIGIRMMSLTSSKAKELKDRHRDFPDVLSGAYIIEVIPDTPAEAGGLKENDVIISINGQSVVTANDVSDVIKKENTLNMVVRRGNEDIVITVIPEEIDP

SEQ ID NO: 1863 - DNA, 1849 bp, Mus musculus
aggccgagtgcgctgtgctcgaggggtgccggctaggcccgactgagagcaagcgaacaggcaggcaagctccgagggggcgcggcccaagctggacaggacaagcgatccagacgcaggagccgtccatcaccaatcagccagcagaacagcgatggaacgcttggcctccagcgataccttcccagtgatagcgcgtagcagcgcctgccgcagcctcttcgggcctgtagaccacgaggagctgggccgcgagctgcggatgcgcctggccgagctgaacgccgaggaccagaaccgctgggacttcaacttccagcaggatgtgcctcttcgaggccctggtcgtctgcagtggatggaggtggacagcgagtctgtgcccgccttctaccgcgagacggtgcaggtggggcgctgtcgcctgcagctggggccccggccacccccggtggccgtggctgtcatcccgcgttctgggccgccggctggcgaggcccccgacggcctagaggaggcgcctgagcagccgcccagcgccccagcctcggccgtggtcgcggagcccaccccacccgcgaccccggccccggcttcagatctgacctcagacccaattccggaggtgaccctggtcgcgacctccgacccgactccggacccgatcccggacgcgaacccggacgtggcgactcgggacggcgaggaacaggtccctgagcaggtctctgagcagggcgaggagtcgggtgctgagccgggtgatgagctgggaactgagccggtctctgagcagggcgaggagcagggcgcagagccggtcgaggagaaggacgaggagccggaggaggagcagggcgcggagccggtcgaggagcagggtgcggagccggtcgaggagcagaatggggagccggtcgaggagcaggacgagaatcaagagcagcgcggccaggagctgaaggaccagcctctctcggggattccaggacgtcctgcacccgggactgctgcggccaatgcgaacgacttcttcgccaagcgcaagagaactgcgcaggagaacaaggcgtcgaacgacgtccctccagggtgtccctctccaaacgtggctcctggggtgggcgcggtggagcagaccccgcgcaaacgtctgagatgagttagtttagaggctaacggccagagagaacttgctgggcatctgggcagcggacgatggaagaactctgggcttcggctgggacctttcgttcatgtagcaggaaccggagatggttgcgtagagcagcccacggttttgtggaaatctgaaaactgtgcaatgtattgagaacactctgtaccatgtgcaaggagtacgctggtcccaaggtgtaaagctttaaatcatttatgtaaaatgtttaatctctactcgctctcagtgcaaaacaaaaagagaaactagaaaatgtagaacgaaggaaaaagatgagaaaaaggaaaaagcatgtatatttgtacaaaaagttaaaaaattatgctaatttaatatttgtatttatccatgcgtggatccctctgccacgcaactgctgggttattgattattaccaaaggcactagaaatcaccagcttcagattacccacaaatgtaaatctacttttatattagactctaggggaatggttgttgagtaaaagcccccacacattcatcttcagttagcttacagtgtcccccacttcattagattgctcttaaacttggtgaccagacagtcgaaatggttcctgtactgcccataccaactgcccagggctcctcgtccgccaggttctaaataaagaggcccaacaaaaatc

SEQ ID NO: 1864 - protein, 335 aa, Mus musculus
MERLASSDTFPVIARSSACRSLFGPVDHEELGRELRMRLAELNAEDQNRWDFNFQQDVPLRGPGRLQWMEVDSESVPAFYRETVQVGRCRLQLGPRPPPVAVAVIPRSGPPAGEAPDGLEEAPEQPPSAPASAVVAEPTPPATPAPASDLTSDPIPEVTLVATSDPTPDPIPDANPDVATRDGEEQVPEQVSEQGEESGAEPGDELGTEPVSEQGEEQGAEPVEEKDEEPEEEQGAEPVEEQGAEPVEEQNGEPVEEQDENQEQRGQELKDQPLSGIPGRPAPGTAAANANDFFAKRKRTAQENKASNDVPPGCPSPNVAPGVGAVEQTPRKRLR

SEQ ID NO: 1865 - DNA, 2525 bp, Mus musculus
gggagacagagcctgcaggaactcaagagctcagcgtcaaggagaggcccctgcaagagtgggaaagaagcaagcactctcgggacacagaagaaacggggagcaaaatgaagagagagctgctgtgtgtactgctgctttgtggactggctttcccattgcctgaccagggaatacatgggaggttcagaagaggagcccggtcctacagagcgacctgcagagatgagccaacgcagacaacttaccaacagcaccagtcgtggctccgacccatgctcagaagcagccgggtggaatattgccggtgcaacagcggcctggtacaatgccactcagtgcctgtccgaagttgcagcgaaccaagatgcttcaatggggggacgtgtcagcaggccctgtatttctctgactttgtctgccagtgccctgatggatttgtagggaaacgctgtgacatagataccagagcaacatgctttgaggagcagggcatcacctacagaggcacgtggagcacagcagaaagtggggctgagtgcatcaactggaatagcagtgttctgtcgctgaagccctacaatgcaaggaggccaaatgccatcaagctgggccttgggaatcacaattactgcagaaacccagaccgagacttgaagccctggtgctatgtctttaaggcagggaagtataccacggagttctgtagcacaccagcttgccctaagggaaaaagcgaggactgctatgttgggaaaggtgtgacttaccgtggcacccacagcctcaccacatcccaggcctcctgcctcccctggaattccatagtcctcatgggcaagagttacacagcgtggaggaccaactcccaggcactcggcctgggcagacacaattattgtcggaatccagatggtgatgccagaccttggtgccatgtgatgaaggaccgaaagctgacgtgggaatactgtgacatgtccccatgctccacctgtggcctgaggcagtacaaacggcctcagtttagaattaaaggaggactctacacagacatcacctcacacccttggcaggctgccatctttgtcaagaacaagaggtctcctggagagagattcctttgtggaggggtgctgatcagttcctgctgggtgctgtcagctgcccactgctttctagagaggttcccccccaatcatcttaaagtggtcttgggcagaacatacagggtggtccccggagaggaagaacagacatttgagattgaaaaatacatagtccatgaggaatttgatgacgatacttatgacaacgacatcgcattactgcagctgaggtcacagtccaagcaatgtgcccaagagagcagctctgttggcactgcctgcctccctgaccccaacctgcagctccctgactggacagagtgtgagctttctggctacggcaagcatgaggcatcgtctccattcttctctgaccggctgaaggaggctcacgtcagactgtacccgtccagccgctgcacctcacagcatctgtttaataaaaccgtcacgaacaacatgctgtgcgctggagacacccggagcggaggcaaccaagacctccacgatgcatgccagggtgactcgggaggccctctggtgtgcatgatcaataaacagatgacattgactggcattatcagctggggcctcggctgtgggcagaaggatgtgcctggggtctacacaaaggttacgaattacctagactggattcacgacaacatgaagcaatgacaaagaaagcccagctccttcaatccagaggaggacctgccttcctcttcctcttctacagaagatgcgcctaaaaggccaagcattctttacaccatcatcttcgtgagctgccactcgggagaggggaggggggtctttgggagcagatgtagcatttacctgtgacaggtacttcacaacttgtaagttttaaggatgaaggtctggctttagaataaatcctgtcagatgagatgacagggagatgccaaccttcctataactctaggattttaaaaagagaggtagaccaaagtctgccctcctggtccactatgttgtacactgaaccacaagatcatgtctcaacagcaaaaaaatacaacttgatctttcaggagtgaaagtttgcactggggacaagaatgtgtttttatagttacacagggggccccacagggcctccacgagaaggaaggggtatctggccgaatcacagcaccataaaatccttgagatcatgcactccccatccctccacactcctcaactcttgggacatatccctttgtatacagtgtaaatgtctttttctttataaactctatagatggttgggagaactgtatgattttaataattgatgaataacactagtatatttatattttaatctattttagtttttactttgttactataactttgtattatactgtacttaaataataaattcagaggtatttttcacacttt

SEQ ID NO: 1866 - protein, 559 aa, Mus musculus
MKRELLCVLLLCGLAFPLPDQGIHGRFRRGARSYRATCRDEPTQTTYQQHQSWLRPMLRSSRVEYCRCNSGLVQCHSVPVRSCSEPRCFNGGTCQQALYFSDFVCQCPDGFVGKRCDIDTRATCFEEQGITYRGTWSTAESGAECINWNSSVLSLKPYNARRPNAIKLGLGNHNYCRNPDRDLKPWCYVFKAGKYTTEFCSTPACPKGKSEDCYVGKGVTYRGTHSLTTSQASCLPWNSIVLMGKSYTAWRTNSQALGLGRHNYCRNPDGDARPWCHVMKDRKLTWEYCDMSPCSTCGLRQYKRPQFRIKGGLYTDITSHPWQAAIFVKNKRSPGERFLCGGVLISSCWVLSAAHCFLERFPPNHLKVVLGRTYRVVPGEEEQTFEIEKYIVHEEFDDDTYDNDIALLQLRSQSKQCAQESSSVGTACLPDPNLQLPDWTECELSGYGKHEASSPFFSDRLKEAHVRLYPSSRCTSQHLFNKTVTNNMLCAGDTRSGGNQDLHDACQGDSGGPLVCMINKQMTLTGIISWGLGCGQKDVPGVYTKVTNYLDWIHDNMKQ

SEQ ID NO: 1867 - DNA, 3116 bp, Mus musculus
gactactaggagctgcgacacggcccagcctcctggcccgccgaattcctgcactccagccatggctccctcgccgctcgcgtggctgctgcgcctggccgcgttcttccatttgtgtactctgctgccgggtcagcacctcggcatgacgaaatgcgaaatcatgtgcgacaagatgacctcacgaatcccagtggctttgctcatccgctatcagctaaaccaggagtcctgcggcaagcgtgccattgtcctggagacgacacagcacagacgcttctgtgctgacccgaaggagaaatgggtccaagacgccatgaagcatctggatcaccaggctgctgccctcactaaaaatggtggcaagtttgagaagcgggtggacaatgtgacacctgggatcaccttggccactaggggactgtccccatctgccctgacaaagcctgaatccgccacattggaagaccttgctttggaactgactactatttcccaggaggccagggggaccatggggacttcccaagagccaccggcagcagtgaccggatcatctctctcaacttccgaggcacaggatgcagggcttacggctaagcctcagagcattggaagttttgaggcggctgacatctccaccaccgtttggccgagtcctgctgtctaccaatctggatctagctcctgggctgaggaaaaagctactgagtccccctccactacagccccatctcctcaggtgtccactacttcaccttcaaccccagaggaaaatgttgggtccgaaggccaacccccatgggtccagggacaggacctcagtccagagaagtctctagggtctgaggagataaacccagttcatactgataatttccaggagagggggcctggcaacacagtccacccctcagtggctcccatctcctctgaagagacccccagcccagagctggtggcctcgggcagccaggctcctaagatagaggaacccatccatgccactgcagatccccagaaactgagtgtgcttatcactcctgtccccgacacccaggcagccacaaggaggcaggcagtggggctactggctttccttggtcttcttttctgcctaggggtggccatgtttgcttaccagagccttcagggctgtccccgcaaaatggcgggggaaatggtagaaggcctccgctacgtcccccgtagctgtggcagtaactcatacgtcctggtgccagtgtgagctgcttgcctgcctgcctgtgtccagagtgtgattcggacagctgtctggggacccccccccccatcctcatacccaccttcatccacgctggggaaatgggaatggagaagctggaccctccaggggctgtgggctccatccaatcccccctcccccgaggggtggccccggaggccaccctagaccactattcacttatcagagacagagcaggtgaccttccagctcctctatatttgaaagaatcctctgctgctggctggttagaggggcccttgacaccccaactccagtgaacaattatttattggattcccagcccctgcgacgacacctgtttcccgcgcgcaccgtggtccgcccatatcacaagcagcaggccaggcctatctgcctgtccccctgacctccttgtgtctcctggctttgctgcagtcgccagcccttctcctccccggccagctgcggtgctatctgccctatgtctccctctatcccctgtacagagcgcaccaccatcaccatcaacaccgctgttgtgtcttttcttgcatgaggttaaagctgtgttttctggagctctccgggaagggagacaagcttgcgagagggtttaaagtgttcctccccagacttggatgtgctgtgaaggcatgctgcgtctgaaggaagggtccagtccccactcggctaccagcaccacaaagtgccccacctgtaaaaggaaagaaacgtggtccagagctggcaataacctatggccctgacatcatcactttctctgagatccttgtctccacccctgggtgcaaccccaccccttatcaacattaatagtcactgccattccactggactgacatttttgtaccctgtgattctgagggctggcaaggagtggcttgagagtgcagatcgtaccctgtatgccccccccccaaatggaggctgagttggggacttgcaggaacagaggccaactcagatggcttcccctgtgttctcactagaaacccctcccccatgcaccaaggtgacagtcacaggtctgccctggctaaaggacaagccacataggaaagattaggacaagcccctcggaggcagaggatccagggtaaacccctggagtggccacaaacccaatttcagtgtagggacttgtgcatgtgtgtacttgcatagtcagacagaggctgccagggtcctttcctgtctctgagagcagtgttcacgccaaggactcacctttgcccccattgcaggcagggccagaactcccatagcattctccaagagccctgtgacattttctggaagggactctgccctgggcgcaaagtgactgctgaagcaaggagcagctgagcagcaccccagcggagctgagccggcaggccacgcccctcggggggggggggcatttctacccaccctgctctgaatagctccaacttcaccttaggagcctcccaggggcgagcttcacccagaagccagtgactcactccttgattggtggaagctcagttggctcctgagagtgaggaagccaaccctttgtcgaccctcctcctgggaagcctgtgggcggctctgatcatgctccacagaaccagttgtaggcctgagccgcagcagcccgagtgcactatatcctggctccttcggtggggaacctttaagggttgggacacccgtcatcggactttgttggttcctccctcccagagcagaatgtgggccgtaacaatctgaggaggactttgaaagttgttgatcctttagggttttttttcaagcatcattaccaatgtctgtgccattttgtattttactaataaaattttaaagtcttgtgaat

SEQ ID NO: 1868 - protein, 395 aa, Mus musculus
MAPSPLAWLLRLAAFFHLCTLLPGQHLGMTKCEIMCDKMTSRIPVALLIRYQLNQESCGKRAIVLETTQHRRFCADPKEKWVQDAMKHLDHQAAALTKNGGKFEKRVDNVTPGITLATRGLSPSALTKPESATLEDLALELTTISQEARGTMGTSQEPPAAVTGSSLSTSEAQDAGLTAKPQSIGSFEAADISTTVWPSPAVYQSGSSSWAEEKATESPSTTAPSPQVSTTSPSTPEENVGSEGQPPWVQGQDLSPEKSLGSEEINPVHTDNFQERGPGNTVHPSVAPISSEETPSPELVASGSQAPKIEEPIHATADPQKLSVLITPVPDTQAATRRQAVGLLAFLGLLFCLGVAMFAYQSLQGCPRKMAGEMVEGLRYVPRSCGSNSYVLVPV

SEQ ID NO: 1869 - DNA, 2720 bp, Mus musculus
gaaacttttcccaatccctaaaagggactttgcttctttttccgggctcggccgcgcagcctctccggaccctagctcgctgacgctgcgggctgcagttctcctggcggggccccgagagccgctgtctccttttctagcactcggaagggctggtgtcgctccacggtcgcgcgtggcgtctgtgccgccagctcagggctgccacccgccaagccgagagtgcgcggccagcggggccgcctgccgtgcacccttcaggatgccgatccgcccggtcggctgaacccgagcgccggcgtcttccgcgcgtggaccgcgaggctgccccgagtcggggctgcctgcatcgctccgtcccttcctgctctcctgctccgggcctcgctcgccgcgggccgcagtcggtgcgcgcaggcggcgaccgggcgtctgggacgcagcatgcaggcgcgttactcggtatcggaccccaacgccctgggagtggtaccctatttgagtgagcaaaactactaccgggcggccggcagctacggcggcatggccagccccatgggcgtctactccggccacccggagcagtacggcgccggcatgggccgctcctacgcgccctaccaccaccagcccgcggcgcccaaggacctggtgaagccgccctacagctatatagcgctcatcaccatggcgatccagaacgcgccagagaagaagatcactctgaacggcatctaccagttcatcatggaccgtttccccttctaccgcgagaacaagcagggctggcagaacagcatccgccacaacctgtcactcaatgagtgcttcgtgaaagtgccgcgcgacgacaagaagccgggcaagggcagctactggacgctcgacccggactcctacaacatgttcgagaatggcagcttcctgcggcggcggcggcgcttcaagaagaaggatgtgcccaaggacaaggaggagcgggcccacctcaaggagccgccctcgaccacggccaagggcgctccgacagggaccccggtagctgacgggcccaaggaggccgagaagaaagtcgtggttaagagcgaggcggcgtcccccgcgctgccggtcatcaccaaggtggagacgctgagccccgagggagcgctgcaggccagtccgcgcagcgcatcctccacgcccgcaggttccccagacggctcgctgccggagcaccacgccgcggcgcctaacgggctgcccggcttcagcgtggagaccatcatgacgctgcgcacgtcgcctccgggcggcgatctgagcccagcggccgcgcgcgccggcctggtggtgccaccgctggcactgccatacgccgcagcgccacccgccgcttacacgcagccgtgcgcgcagggcctggaggctgcgggctccgcgggctaccagtgcagtatgcgggctatgagtctgtacaccggggccgagcggcccgcgcacgtgtgcgttccgcccgcgctggacgaggctctgtcggaccacccgagcggccccggctccccgctcggcgccctcaacctcgcagcgggtcaggagggcgcgttgggggcctcgggtcaccaccaccagcatcacggccacctccacccgcaggcgccaccgcccgccccgcagccccctcccgcgccgcagcccgccacccaggccacctcctggtatctgaaccacggcggggacctgagccacctccccggccacacgtttgcaacccaacagcaaactttccccaacgtccgggagatgttcaactcgcaccggctaggactggacaactcgtccctcggggagtcccaggtgagcaatgcgagctgtcagctgccctatcgagctacgccgtccctctaccgccacgcagccccctactcttacgactgcaccaaatactgaggctgtccagtccgctccagccccaggaccgcaccggcttcgcctcctccatgggaaccttcttcgacggagccgcagaaagcgacggaaagcgcccctctctcagaaccaggagcagagagctccgtgcaactcgcaggtaacttatccgcagctcagtttgagatctcagcgagtccctctaagggggatgcagcccagcaaaacgaaatacagattttttttttaattccttcccctacccagatgctgcgcctgctccccttggggcttcatagattagcttatggaccaaaccccatagggacccctaatgacttctgtggagattctccacgggcgcaagaggtctctccggataaggtgccttctgtaaacgagtgcggatttgtaaccaggctattttgttcttgcccagagcctttaatataatatttaaagttgtgtccactggataaggtttcgtcttgcccaactgttactgccaaattgaattcaagaaacgtgtgtgggtcttttctccccacgtcaccatgataaaataggtccctccccaaactgtaggtcttttacaaaacaagaaaataatttatttttttgttgttgttggataacgaaattaagtatcggatacttttaatttaggaagtgcatggctttgtacagtagatgccatctggggtattccaaaaacacaccaaaagactttaaaatttcaatctcacctgtgtttgtcttatgtgatctcagtgttgtatttaccttaaaataaacccgtgttgtttttctgc

SEQ ID NO: 1870 - protein, 494 aa, Mus musculus
MQARYSVSDPNALGVVPYLSEQNYYRAAGSYGGMASPMGVYSGHPEQYGAGMGRSYAPYHHQPAAPKDLVKPPYSYIALITMAIQNAPEKKITLNGIYQFIMDRFPFYRENKQGWQNSIRHNLSLNECFVKVPRDDKKPGKGSYWTLDPDSYNMFENGSFLRRRRRFKKKDVPKDKEERAHLKEPPSTTAKGAPTGTPVADGPKEAEKKVVVKSEAASPALPVITKVETLSPEGALQASPRSASSTPAGSPDGSLPEHHAAAPNGLPGFSVETIMTLRTSPPGGDLSPAAARAGLVVPPLALPYAAAPPAAYTQPCAQGLEAAGSAGYQCSMRAMSLYTGAERPAHVCVPPALDEALSDHPSGPGSPLGALNLAAGQEGALGASGHHHQHHGHLHPQAPPPAPQPPPAPQPATQATSWYLNHGGDLSHLPGHTFATQQQTFPNVREMFNSHRLGLDNSSLGESQVSNASCQLPYRATPSLYRHAAPYSYDCTKY

SEQ ID NO: 1871 - DNA, 3293 bp, Mus musculus
ggagagagaggcgggtgccagtggagaaagtccttgctctcccgctcatcttttcattgctctctctccttcccgcagacaacccggacctcctctgggcgccagctcctcggctccaacccgtccagaatcaagcgggattttttttttctttccctctagaaattggctttggtgtgtcgcccgccctctcccctcctcctcgcaactcctcccctcttttttttcctccttcttcttcttcctgagacatggcccgggcagtggctcctggaagaggaacaagtgtgggaaaagggagaggaaatcggagctaaatgacaggatgcaggcgacttgagacacaaaaagaaaagcgcttctcgcgaattcaggcattgcctcgccgctagccttccccgccaagacccgctgaggattttctggttcttaggcggacttaagagcgtttcggattgttaagattatcgtttgctggtttttcgtccgcgcaatcgtgttctcctgcggctgcctggggactggcttggcgaaggaggatggagagggggctgccgttgctgtgcgccacgctcgcccttgccctcgccctggcgggcgctttccgcagcgacaaatgtggcgggaccataaaaatcgaaaacccagggtacctcacatctcccggttaccctcattcttaccatccaagtgagaagtgtgaatggctaatccaagctccggaaccctaccagagaatcatgatcaacttcaacccacatttcgatttggaggacagagactgcaagtatgactacgtggaagtaatcgatggggagaatgaaggcggccgcctgtgggggaagttctgtgggaagattgcaccttctcctgtggtgtcttcagggccctttctcttcatcaaatttgtctctgactatgagacacatggggcagggttttccatccgctatgaaatcttcaagagagggcccgaatgttctcagaactatacagcacctactggagtgataaagtcccctgggttccctgaaaaataccccaacagcttggagtgcacctacatcatctttgcaccaaagatgtctgagataatcctggagtttgaaagttttgacctggagcaagactcgaatcctcccggaggaatgttctgtcgctatgaccggctggagatctgggatggattccctgaagttggccctcacattgggcgttattgtgggcagaaaactcctggccggatccgctcctcttcaggcgttctatccatggtcttttacactgacagcgcaatagcaaaagaaggtttctcagccaactacagtgtgctacagagcagcatctctgaagattttaagtgtatggaggctctgggcatggaatctggagagatccattctgatcagatcactgcatcttcacagtatggtaccaactggtctgtagagcgctcccgcctgaactaccctgaaaatgggtggactccaggagaagactcctacaaggagtggatccaggtggacttgggcctcctgcgattcgttactgctgtagggacacagggtgccatttccaaggaaaccaagaagaaatattatgtcaagacttacagagtagacatcagctccaacggagaggactggatctccctgaaagagggaaataaagccattatctttcagggaaacaccaaccccacagatgttgtcttaggagttttctccaaaccactgataactcgatttgtccgaatcaaacctgtatcctgggaaactggtatatctatgagatttgaagtttatggctgcaagataacagattatccttgctctggaatgttgggcatggtgtctggacttatttcagactcccagattacagcatccaatcaagccgacaggaattggatgccagaaaacatccgtctggtgaccagtcgtaccggctgggcactgccaccctcaccccacccatacaccaatgaatggctccaagtggacctgggagatgagaagatagtaagaggtgtcatcattcagggtgggaagcaccgagaaaacaaggtgttcatgaggaagttcaagatcgcctatagtaacaatggctctgactggaaaactatcatggatgacagcaagcgcaaggctaagtcgttcgaaggcaacaacaactatgacacacctgagcttcggacgttttcacctctctccacaaggttcatcaggatctaccctgagagagccacacacagtgggcttgggctgaggatggagctactgggctgtgaagtggaagcacctacagctggaccaaccacacccaatgggaacccagtggatgagtgtgacgacgaccaggccaactgccacagtggcacaggtgatgacttccagctcacagagaagccaaccattatagacagcaccatccaatcagagttcccgacatacggttttaactgcgagtttggctggggctctcacaagacattctgccactgggagcatgacagccatgcacagctcaggtggagtgtgctgaccagcaagacagggccgattcaggaccatacaggagatggcaacttcatctattcccaagctgatgaaaatcagaaaggcaaagtagcccgcctggtgagccctgtggtctattcccagagctctgcccactgtatgaccttctggtatcacatgtccggctctcatgtgggtacactgagggtcaaactacgctaccagaagccagaggaatatgatcaactggtctggatggtggttgggcaccaaggagaccactggaaagaaggacgtgtcttgctgcacaaatctctgaaactatatcaggttatttttgaaggtgaaatcggaaaaggaaaccttggtggaattgctgtggatgatatcagtattaacaaccatatttctcaggaagactgtgcaagtaaggatgggtttgggctggaagtaaacaaagcccttagccctggcaggatccttagcatcactccaggatatgaaggagaaggggaaggtgacaagaacatctccaggaagccaggcaatgtgcttaagaccctggatcccatcctgatcaccatcatagccatgagtgccctgggagtactcctgggtgcagtctgtggagttgtgctgtactgtgcctgttggcacaatgggatgtcagaaaggaacctatctgccctggagaactataactttgaacttgtggatggtgtaaagttgaaaaaagataaactgaacccacagagtaattactcagaggcgtga

SEQ ID NO: 1872 - protein, 917 aa, Mus musculus
MERGLPLLCATLALALALAGAFRSDKCGGTIKIENPGYLTSPGYPHSYHPSEKCEWLIQAPEPYQRIMINFNPHFDLEDRDCKYDYVEVIDGENEGGRLWGKFCGKIAPSPVVSSGPFLFIKFVSDYETHGAGFSIRYEIFKRGPECSQNYTAPTGVIKSPGFPEKYPNSLECTYIIFAPKMSEIILEFESFDLEQDSNPPGGMFCRYDRLEIWDGFPEVGPHIGRYCGQKTPGRIRSSSGVLSMVFYTDSAIAKEGFSANYSVLQSSISEDFKCMEALGMESGEIHSDQITASSQYGTNWSVERSRLNYPENGWTPGEDSYKEWIQVDLGLLRFVTAVGTQGAISKETKKKYYVKTYRVDISSNGEDWISLKEGNKAIIFQGNTNPTDVVLGVFSKPLITRFVRIKPVSWETGISMRFEVYGCKITDYPCSGMLGMVSGLISDSQITASNQADRNWMPENIRLVTSRTGWALPPSPHPYTNEWLQVDLGDEKIVRGVIIQGGKHRENKVFMRKFKIAYSNNGSDWKTIMDDSKRKAKSFEGNNNYDTPELRTFSPLSTRFIRIYPERATHSGLGLRMELLGCEVEAPTAGPTTPNGNPVDECDDDQANCHSGTGDDFQLTEKPTIIDSTIQSEFPTYGFNCEFGWGSHKTFCHWEHDSHAQLRWSVLTSKTGPIQDHTGDGNFIYSQADENQKGKVARLVSPVVYSQSSAHCMTFWYHMSGSHVGTLRVKLRYQKPEEYDQLVWMVVGHQGDHWKEGRVLLHKSLKLYQVIFEGEIGKGNLGGIAVDDISINNHISQEDCASKDGFGLEVNKALSPGRILSITPGYEGEGEGDKNISRKPGNVLKTLDPILITIIAMSALGVLLGAVCGVVLYCACWHNGMSERNLSALENYNFELVDGVKLKKDKLNPQSNYSEA

SEQ ID NO: 1873 - DNA, 3175 bp, Mus musculus
cgcagacaacccggacctcctctgggcgccagctcctcggctccaacccgtccagaatcaagcgggattttttttttctttccctctagaaattggctttggtgtgtcgcccgccctctcccctcctcctcgcaactcctcccctcttttttttcctccttcttcttcttcctgagacatggcccgggcagtggctcctggaagaggaacaagtgtgggaaaagggagaggaaatcggagctaaatgacaggatgcaggcgacttgagacacaaaaagaaaagcgcttctcgcgaattcaggcattgcctcgccgctagccttccccgccaagacccgctgaggattttctggttcttaggcggacttaagagcgtttcggattgttaagattatcgtttgctggtttttcgtccgcgcaatcgtgttctcctgcggctgcctggggactggcttggcgaaggaggatggagagggggctgccgttgctgtgcgccacgctcgcccttgccctcgccctggcgggcgctttccgcagcgacaaatgtggcgggaccataaaaatcgaaaacccagggtacctcacatctcccggttaccctcattcttaccatccaagtgagaagtgtgaatggctaatccaagctccggaaccctaccagagaatcatgatcaacttcaacccacatttcgatttggaggacagagactgcaagtatgactacgtggaagtaatcgatggggagaatgaaggcggccgcctgtgggggaagttctgtgggaagattgcaccttctcctgtggtgtcttcagggccctttctcttcatcaaatttgtctctgactatgagacacatggggcagggttttccatccgctatgaaatcttcaagagagggcccgaatgttctcagaactatacagcacctactggagtgataaagtcccctgggttccctgaaaaataccccaacagcttggagtgcacctacatcatctttgcaccaaagatgtctgagataatcctggagtttgaaagttttgacctggagcaagactcgaatcctcccggaggaatgttctgtcgctatgaccggctggagatctgggatggattccctgaagttggccctcacattgggcgttattgtgggcagaaaactcctggccggatccgctcctcttcaggcgttctatccatggtcttttacactgacagcgcaatagcaaaagaaggtttctcagccaactacagtgtgctacagagcagcatctctgaagattttaagtgtatggaggctctgggcatggaatctggagagatccattctgatcagatcactgcatcttcacagtatggtaccaactggtctgtagagcgctcccgcctgaactaccctgaaaatgggtggactccaggagaagactcctacaaggagtggatccaggtggacttgggcctcctgcgattcgttactgctgtagggacacagggtgccatttccaaggaaaccaagaagaaatattatgtcaagacttacagagtagacatcagctccaacggagaggactggatctccctgaaagagggaaataaagccattatctttcagggaaacaccaaccccacagatgttgtcttaggagttttctccaaaccactgataactcgatttgtccgaatcaaacctgtatcctgggaaactggtatatctatgagatttgaagtttatggctgcaagataacagattatccttgctctggaatgttgggcatggtgtctggacttatttcagactcccagattacagcatccaatcaagccgacaggaattggatgccagaaaacatccgtctggtgaccagtcgtaccggctgggcactgccaccctcaccccacccatacaccaatgaatggctccaagtggacctgggagatgagaagatagtaagaggtgtcatcattcagggtgggaagcaccgagaaaacaaggtgttcatgaggaagttcaagatcgcctatagtaacaatggctctgactggaaaactatcatggatgacagcaagcgcaaggctaagtcgttcgaaggcaacaacaactatgacacacctgagcttcggacgttttcacctctctccacaaggttcatcaggatctaccctgagagagccacacacagtgggcttgggctgaggatggagctactgggctgtgaagtggaaggtaactacagttcccagagtctctcctgctttcttcctttctatttattttctcttgcattttatccctctgacttgcctatggggttcccaataattgcatctgctttcttcactggctgcttggttccttggtacccagcccagaagaatgtgtttctgggtagtacttggcaagagagagagaaaagatctgtaaaaattttgctggtctccctgacacacagttttgcctcagcaggagatggcaacttcatctattcccaagctgatgaaaatcagaaaggcaaagtagcccgcctggtgagccctgtggtctattcccagagctctgcccactgtatgaccttctggtatcacatgtccggctctcatgtgggtacactgagggtcaaactacgctaccagaagccagaggaatatgatcaactggtctggatggtggttgggcaccaaggagaccactggaaagaaggacgtgtcttgctgcacaaatctctgaaactatatcaggttatttttgaaggtgaaatcggaaaaggaaaccttggtggaattgctgtggatgatatcagtattaacaaccatatttctcaggaagactgtgcaaaaccaacagacctagataaaaagaacacagaaattaaaattgatgaaacagggagcactccaggatatgaaggagaaggggaaggtgacaagaacatctccaggaagccaggcaatgtgcttaagaccctggatcccatcctgatcaccatcatagccatgagtgccctgggagtactcctgggtgcagtctgtggagttgtgctgtactgtgcctgttggcacaatgggatgtcagaaaggaacctatctgccctggagaactataactttgaacttgtggatggtgtaaagttgaaaaaagataaactgaacccacagagtaattactcagaggcgtga

SEQ ID NO: 1874 - protein, 934 aa, Mus musculus
ERFGLLRLSFAGFSSAQSCSPAAAWGLAWRRRMERGLPLLCATLALALALAGAFRSDKCGGTIKIENPGYLTSPGYPHSYHPSEKCEWLIQAPEPYQRIMINFNPHFDLEDRDCKYDYVEVIDGENEGGRLWGKFCGKIAPSPVVSSGPFLFIKFVSDYETHGAGFSIRYEIFKRGPECSQNYTAPTGVIKSPGFPEKYPNSLECTYIIFAPKMSEIILEFESFDLEQDSNPPGGMFCRYDRLEIWDGFPEVGPHIGRYCGQKTPGRIRSSSGVLSMVFYTDSAIAKEGFSANYSVLQSSISEDFKCMEALGMESGEIHSDQITASSQYGTNWSVERSRLNYPENGWTPGEDSYKEWIQVDLGLLRFVTAVGTQGAISKETKKKYYVKTYRVDISSNGEDWISLKEGNKAIIFQGNTNPTDVVLGVFSKPLITRFVRIKPVSWETGISMRFEVYGCKITDYPCSGMLGMVSGLISDSQITASNQADRNWMPENIRLVTSRTGWALPPSPHPYTNEWLQVDLGDEKIVRGVIIQGGKHRENKVFMRKFKIAYSNNGSDWKTIMDDSKRKAKSFEGNNNYDTPELRTFSPLSTRFIRIYPERATHSGLGLRMELLGCEVEGNYSSQSLSCFLPFYLFSLAFYPSDLPMGFPIIASAFFTGCLVPWYPAQKNVFLGSTWQEREKRSVKILLVSLTHSFASAGDGNFIYSQADENQKGKVARLVSPVVYSQSSAHCMTFWYHMSGSHVGTLRVKLRYQKPEEYDQLVWMVVGHQGDHWKEGRVLLHKSLKLYQVIFEGEIGKGNLGGIAVDDISINNHISQEDCAKPTDLDKKNTEIKIDETGSTPGYEGEGEGDKNISRKPGNVLKTLDPILITIIAMSALGVLLGAVCGVVLYCACWHNGMSERNLSALENYNFELVDGVKLKKDKLNPQSNYSEA

SEQ ID NO: 1875 - DNA, 2101 bp, Mus musculus
ttcctgagacatggcccgggcagtggctcctggaagaggaacaagtgtgggaaaagggagaggaaatcggagctaaatgacaggatgcaggcgacttgagacacaaaaagaaaagcgcttctcgcgaattcaggcattgcctcgccgctagccttccccgccaagacccgctgaggattttctggttcttaggcggacttaagagcgtttcggattgttaagattatcgtttgctggtttttcgtccgcgcaatcgtgttctcctgcggctgcctggggactggcttggcgaaggaggatggagagggggctgccgttgctgtgcgccacgctcgcccttgccctcgccctggcgggcgctttccgcagcgacaaatgtggcgggaccataaaaatcgaaaacccagggtacctcacatctcccggttaccctcattcttaccatccaagtgagaagtgtgaatggctaatccaagctccggaaccctaccagagaatcatgatcaacttcaacccacatttcgatttggaggacagagactgcaagtatgactacgtggaagtaatcgatggggagaatgaaggcggccgcctgtgggggaagttctgtgggaagattgcaccttctcctgtggtgtcttcagggccctttctcttcatcaaatttgtctctgactatgagacacatggggcagggttttccatccgctatgaaatcttcaagagagggcccgaatgttctcagaactatacagcacctactggagtgataaagtcccctgggttccctgaaaaataccccaacagcttggagtgcacctacatcatctttgcaccaaagatgtctgagataatcctggagtttgaaagttttgacctggagcaagactcgaatcctcccggaggaatgttctgtcgctatgaccggctggagatctgggatggattccctgaagttggccctcacattgggcgttattgtgggcagaaaactcctggccggatccgctcctcttcaggcgttctatccatggtcttttacactgacagcgcaatagcaaaagaaggtttctcagccaactacagtgtgctacagagcagcatctctgaagattttaagtgtatggaggctctgggcatggaatctggagagatccattctgatcagatcactgcatcttcacagtatggtaccaactggtctgtagagcgctcccgcctgaactaccctgaaaatgggtggactccaggagaagactcctacaaggagtggatccaggtggacttgggcctcctgcgattcgttactgctgtagggacacagggtgccatttccaaggaaaccaagaagaaatattatgtcaagacttacagagtagacatcagctccaacggagaggactggatctccctgaaagagggaaataaagccattatctttcagggaaacaccaaccccacagatgttgtcttaggagttttctccaaaccactgataactcgatttgtccgaatcaaacctgtatcctgggaaactggtatatctatgagatttgaagtttatggctgcaagataacagattatccttgctctggaatgttgggcatggtgtctggacttatttcagactcccagattacagcatccaatcaagccgacaggaattggatgccagaaaacatccgtctggtgaccagtcgtaccggctgggcactgccaccctcaccccacccatacaccaatgaatggctccaagtggacctgggagatgagaagatagtaagaggtgtcatcattcagggtgggaagcaccgagaaaacaaggtgttcatgaggaagttcaagatcgcctatagtaacaatggctctgactggaaaactatcatggatgacagcaagcgcaaggctaagtcgttcgaaggcaacaacaactatgacacacctgagcttcggacgttttcacctctctccacaaggttcatcaggatctaccctgagagagccacacacagtgggcttgggctgaggatggagctactgggctgtgaagtggaagagaagccaaccattatagacagcaccatccaatcaggtatcaaa

SEQ ID NO: 1876 - protein, 601 aa, Mus musculus
MERGLPLLCATLALALALAGAFRSDKCGGTIKIENPGYLTSPGYPHSYHPSEKCEWLIQAPEPYQRIMINFNPHFDLEDRDCKYDYVEVIDGENEGGRLWGKFCGKIAPSPVVSSGPFLFIKFVSDYETHGAGFSIRYEIFKRGPECSQNYTAPTGVIKSPGFPEKYPNSLECTYIIFAPKMSEIILEFESFDLEQDSNPPGGMFCRYDRLEIWDGFPEVGPHIGRYCGQKTPGRIRSSSGVLSMVFYTDSAIAKEGFSANYSVLQSSISEDFKCMEALGMESGEIHSDQITASSQYGTNWSVERSRLNYPENGWTPGEDSYKEWIQVDLGLLRFVTAVGTQGAISKETKKKYYVKTYRVDISSNGEDWISLKEGNKAIIFQGNTNPTDVVLGVFSKPLITRFVRIKPVSWETGISMRFEVYGCKITDYPCSGMLGMVSGLISDSQITASNQADRNWMPENIRLVTSRTGWALPPSPHPYTNEWLQVDLGDEKIVRGVIIQGGKHRENKVFMRKFKIAYSNNGSDWKTIMDDSKRKAKSFEGNNNYDTPELRTFSPLSTRFIRIYPERATHSGLGLRMELLGCEVEEKPTIIDSTIQSGIK

SEQ ID NO: 1877 - DNA, 2896 bp, Mus musculus
ccgggcagtggctcctggaagaggaacaagtgtgggaaaagggagaggaaatcggagctaaatgacaggatgcaggcgacttgagacacaaaaagaaaagcgcttctcgcgaattcaggcattgcctcgccgctagccttccccgccaagacccgctgaggattttctggttcttaggcggacttaagagcgtttcggattgttaagattatcgtttgctggtttttcgtccgcgcaatcgtgttctcctgcggctgcctggggactggcttggcgaaggaggatggagagggggctgccgttgctgtgcgccacgctcgcccttgccctcgccctggcgggcgctttccgcagcgacaaatgtggcgggaccataaaaatcgaaaacccagggtacctcacatctcccggttaccctcattcttaccatccaagtgagaagtgtgaatggctaatccaagctccggaaccctaccagagaatcatgatcaacttcaacccacatttcgatttggaggacagagactgcaagtatgactacgtggaagtaatcgatggggagaatgaaggcggccgcctgtgggggaagttctgtgggaagattgcaccttctcctgtggtgtcttcagggccctttctcttcatcaaatttgtctctgactatgagacacatggggcagggttttccatccgctatgaaatcttcaagagagggcccgaatgttctcagaactatacagcacctactggagtgataaagtcccctgggttccctgaaaaataccccaacagcttggagtgcacctacatcatctttgcaccaaagatgtctgagataatcctggagtttgaaagttttgacctggagcaagactcgaatcctcccggaggaatgttctgtcgctatgaccggctggagatctgggatggattccctgaagttggccctcacattgggcgttattgtgggcagaaaactcctggccggatccgctcctcttcaggcgttctatccatggtcttttacactgacagcgcaatagcaaaagaaggtttctcagccaactacagtgtgctacagagcagcatctctgaagattttaagtgtatggaggctctgggcatggaatctggagagatccattctgatcagatcactgcatcttcacagtatggtaccaactggtctgtagagcgctcccgcctgaactaccctgaaaatgggtggactccaggagaagactcctacaaggagtggatccaggtggacttgggcctcctgcgattcgttactgctgtagggacacagggtgccatttccaaggaaaccaagaagaaatattatgtcaagacttacagagtagacatcagctccaacggagaggactggatctccctgaaagagggaaataaagccattatctttcagggaaacaccaaccccacagatgttgtcttaggagttttctccaaaccactgataactcgatttgtccgaatcaaacctgtatcctgggaaactggtatatctatgagatttgaagtttatggctgcaagataacagattatccttgctctggaatgttgggcatggtgtctggacttatttcagactcccagattacagcatccaatcaagccgacaggaattggatgccagaaaacatccgtctggtgaccagtcgtaccggctgggcactgccaccctcaccccacccatacaccaatgaatggctccaagtggacctgggagatgagaagatagtaagaggtgtcatcattcagggtgggaagcaccgagaaaacaaggtgttcatgaggaagttcaagatcgcctatagtaacaatggctctgactggaaaactatcatggatgacagcaagcgcaaggctaagtcgttcgaaggcaacaacaactatgacacacctgagcttcggacgttttcacctctctccacaaggttcatcaggatctaccctgagagagccacacacagtgggcttgggctgaggatggagctactgggctgtgaagtggaagtattaatggccttcctgatcgttgtgattaattcttcccttatgtctgtcactgaagagttcccgacatacggttttaactgcgagtttggctggggctctcacaagacattctgccactgggagcatgacagccatgcacagctcaggtggagtgtgctgaccagcaagacagggccgattcaggaccatacaggagatggcaacttcatctattcccaagctgatgaaaatcagaaaggcaaagtagcccgcctggtgagccctgtggtctattcccagagctctgcccactgtatgaccttctggtatcacatgtccggctctcatgtgggtacactgagggtcaaactacgctaccagaagccagaggaatatgatcaactggtctggatggtggttgggcaccaaggagaccactggaaagaaggacgtgtcttgctgcacaaatctctgaaactatatcaggttatttttgaaggtgaaatcggaaaaggaaaccttggtggaattgctgtggatgatatcagtattaacaaccatatttctcaggaagactgtgcaaggagcactccaggatatgaaggagaaggggaaggtgacaagaacatctccaggaagccaggcaatgtgcttaagaccctggatcccatcctgatcaccatcatagccatgagtgccctgggagtactcctgggtgcagtctgtggagttgtgctgtactgtgcctgttggcacaatgggatgtcagaaaggaacctatctgccctggagaactataactttgaacttgtggatggtgtaaagttgaaaaaagataaactgaacccacagagtaattactcagaggcgtga

SEQ ID NO: 1878 - protein, 902 aa, Mus musculus
ERFGLLRLSFAGFSSAQSCSPAAAWGLAWRRRMERGLPLLCATLALALALAGAFRSDKCGGTIKIENPGYLTSPGYPHSYHPSEKCEWLIQAPEPYQRIMINFNPHFDLEDRDCKYDYVEVIDGENEGGRLWGKFCGKIAPSPVVSSGPFLFIKFVSDYETHGAGFSIRYEIFKRGPECSQNYTAPTGVIKSPGFPEKYPNSLECTYIIFAPKMSEIILEFESFDLEQDSNPPGGMFCRYDRLEIWDGFPEVGPHIGRYCGQKTPGRIRSSSGVLSMVFYTDSAIAKEGFSANYSVLQSSISEDFKCMEALGMESGEIHSDQITASSQYGTNWSVERSRLNYPENGWTPGEDSYKEWIQVDLGLLRFVTAVGTQGAISKETKKKYYVKTYRVDISSNGEDWISLKEGNKAIIFQGNTNPTDVVLGVFSKPLITRFVRIKPVSWETGISMRFEVYGCKITDYPCSGMLGMVSGLISDSQITASNQADRNWMPENIRLVTSRTGWALPPSPHPYTNEWLQVDLGDEKIVRGVIIQGGKHRENKVFMRKFKIAYSNNGSDWKTIMDDSKRKAKSFEGNNNYDTPELRTFSPLSTRFIRIYPERATHSGLGLRMELLGCEVEVLMAFLIVVINSSLMSVTEEFPTYGFNCEFGWGSHKTFCHWEHDSHAQLRWSVLTSKTGPIQDHTGDGNFIYSQADENQKGKVARLVSPVVYSQSSAHCMTFWYHMSGSHVGTLRVKLRYQKPEEYDQLVWMVVGHQGDHWKEGRVLLHKSLKLYQVIFEGEIGKGNLGGIAVDDISINNHISQEDCARSTPGYEGEGEGDKNISRKPGNVLKTLDPILITIIAMSALGVLLGAVCGVVLYCACWHNGMSERNLSALENYNFELVDGVKLKKDKLNPQSNYSEA

SEQ ID NO: 1879 - DNA, 2631 bp, Mus musculus
gcagacaaatgtggcgggaccataaaaatcgaaaacccagggtacctcacatctcccggttaccctcattcttaccatccaagtgagaagtgtgaatggctaatccaagctccggaaccctaccagagaatcatgatcaacttcaacccacatttcgatttggaggacagagactgcaagtatgactacgtggaagtaatcgatggggagaatgaaggcggccgcctgtgggggaagttctgtgggaagattgcaccttctcctgtggtgtcttcagggccctttctcttcatcaaatttgtctctgactatgagacacatggggcagggttttccatccgctatgaaatcttcaagagagggcccgaatgttctcagaactatacagcacctactggagtgataaagtcccctgggttccctgaaaaataccccaacagcttggagtgcacctacatcatctttgcaccaaagatgtctgagataatcctggagtttgaaagttttgacctggagcaagactcgaatcctcccggaggaatgttctgtcgctatgaccggctggagatctgggatggattccctgaagttggccctcacattgggcgttattgtgggcagaaaactcctggccggatccgctcctcttcaggcgttctatccatggtcttttacactgacagcgcaatagcaaaagaaggtttctcagccaactacagtgtgctacagagcagcatctctgaagattttaagtgtatggaggctctgggcatggaatctggagagatccattctgatcagatcactgcatcttcacagtatggtaccaactggtctgtagagcgctcccgcctgaactaccctgaaaatgggtggactccaggagaagactcctacaaggagtggatccaggtggacttgggcctcctgcgattcgttactgctgtagggacacagggtgccatttccaaggaaaccaagaagaaatattatgtcaagacttacagagtagacatcagctccaacggagaggactggatctccctgaaagagggaaataaagccattatctttcagggaaacaccaaccccacagatgttgtcttaggagttttctccaaaccactgataactcgatttgtccgaatcaaacctgtatcctgggaaactggtatatctatgagatttgaagtttatggctgcaagataacagattatccttgctctggaatgttgggcatggtgtctggacttatttcagactcccagattacagcatccaatcaagccgacaggaattggatgccagaaaacatccgtctggtgaccagtcgtaccggctgggcactgccaccctcaccccacccatacaccaatgaatggctccaagtggacctgggagatgagaagatagtaagaggtgtcatcattcagggtgggaagcaccgagaaaacaaggtgttcatgaggaagttcaagatcgcctatagtaacaatggctctgactggaaaactatcatggatgacagcaagcgcaaggctaagtcgttcgaaggcaacaacaactatgacacacctgagcttcggacgttttcacctctctccacaaggttcatcaggatctaccctgagagagccacacacagtgggcttgggctgaggatggagctactgggctgtgaagtggaagtattaatggccttcctgatcgttgtgattaattcttcccttatgtctgtcttccccactgaagagttcccgacatacggttttaactgcgagtttggctggggctctcacaagacattctgccactgggagcatgacagccatgcacagctcaggtggagtgtgctgaccagcaagacagggccgattcaggaccatacaggagatggcaacttcatctattcccaagctgatgaaaatcagaaaggcaaagtagcccgcctggtgagccctgtggtctattcccagagctctgcccactgtatgaccttctggtatcacatgtccggctctcatgtgggtacactgagggtcaaactacgctaccagaagccagaggaatatgatcaactggtctggatggtggttgggcaccaaggagaccactggaaagaaggacgtgtcttgctgcacaaatctctgaaactatatcaggttatttttgaaggtgaaatcggaaaaggaaaccttggtggaattgctgtggatgatatcagtattaacaaccatatttctcaggaagactgtgcaacacccttccctttattcctgattttctatgtactcacatgtagcctcggtgttcatgagtcaatattgtctccttccttagggagcactccaggatatgaaggagaaggggaaggtgacaagaacatctccaggaagccaggcaatgtgcttaagaccctggatcccatcctgatcaccatcatagccatgagtgccctgggagtactcctgggtgcagtctgtggagttgtgctgtactgtgcctgttggcacaatgggatgtcagaaaggaacctatctgccctggagaactataactttgaacttgtggatggtgtaaagttgaaaaaagataaactgaacccacagagtaattactcagaggcgtga

SEQ ID NO: 1880 - protein, 876 aa, Mus musculus
ADKCGGTIKIENPGYLTSPGYPHSYHPSEKCEWLIQAPEPYQRIMINFNPHFDLEDRDCKYDYVEVIDGENEGGRLWGKFCGKIAPSPVVSSGPFLFIKFVSDYETHGAGFSIRYEIFKRGPECSQNYTAPTGVIKSPGFPEKYPNSLECTYIIFAPKMSEIILEFESFDLEQDSNPPGGMFCRYDRLEIWDGFPEVGPHIGRYCGQKTPGRIRSSSGVLSMVFYTDSAIAKEGFSANYSVLQSSISEDFKCMEALGMESGEIHSDQITASSQYGTNWSVERSRLNYPENGWTPGEDSYKEWIQVDLGLLRFVTAVGTQGAISKETKKKYYVKTYRVDISSNGEDWISLKEGNKAIIFQGNTNPTDVVLGVFSKPLITRFVRIKPVSWETGISMRFEVYGCKITDYPCSGMLGMVSGLISDSQITASNQADRNWMPENIRLVTSRTGWALPPSPHPYTNEWLQVDLGDEKIVRGVIIQGGKHRENKVFMRKFKIAYSNNGSDWKTIMDDSKRKAKSFEGNNNYDTPELRTFSPLSTRFIRIYPERATHSGLGLRMELLGCEVEVLMAFLIVVINSSLMSVFPTEEFPTYGFNCEFGWGSHKTFCHWEHDSHAQLRWSVLTSKTGPIQDHTGDGNFIYSQADENQKGKVARLVSPVVYSQSSAHCMTFWYHMSGSHVGTLRVKLRYQKPEEYDQLVWMVVGHQGDHWKEGRVLLHKSLKLYQVIFEGEIGKGNLGGIAVDDISINNHISQEDCATPFPLFLIFYVLTCSLGVHESILSPSLGSTPGYEGEGEGDKNISRKPGNVLKTLDPILITIIAMSALGVLLGAVCGVVLYCACWHNGMSERNLSALENYNFELVDGVKLKKDKLNPQSNYSEA

SEQ ID NO: 1881 - DNA, 2622 bp, Mus musculus
gacaaatgtggcgggaccataaaaatcgaaaacccagggtacctcacatctcccggttaccctcattcttaccatccaagtgagaagtgtgaatggctaatccaagctccggaaccctaccagagaatcatgatcaacttcaacccacatttcgatttggaggacagagactgcaagtatgactacgtggaagtaatcgatggggagaatgaaggcggccgcctgtgggggaagttctgtgggaagattgcaccttctcctgtggtgtcttcagggccctttctcttcatcaaatttgtctctgactatgagacacatggggcagggttttccatccgctatgaaatcttcaagagagggcccgaatgttctcagaactatacagcacctactggagtgataaagtcccctgggttccctgaaaaataccccaacagcttggagtgcacctacatcatctttgcaccaaagatgtctgagataatcctggagtttgaaagttttgacctggagcaagactcgaatcctcccggaggaatgttctgtcgctatgaccggctggagatctgggatggattccctgaagttggccctcacattgggcgttattgtgggcagaaaactcctggccggatccgctcctcttcaggcgttctatccatggtcttttacactgacagcgcaatagcaaaagaaggtttctcagccaactacagtgtgctacagagcagcatctctgaagattttaagtgtatggaggctctgggcatggaatctggagagatccattctgatcagatcactgcatcttcacagtatggtaccaactggtctgtagagcgctcccgcctgaactaccctgaaaatgggtggactccaggagaagactcctacaaggagtggatccaggtggacttgggcctcctgcgattcgttactgctgtagggacacagggtgccatttccaaggaaaccaagaagaaatattatgtcaagacttacagagtagacatcagctccaacggagaggactggatctccctgaaagagggaaataaagccattatctttcagggaaacaccaaccccacagatgttgtcttaggagttttctccaaaccactgataactcgatttgtccgaatcaaacctgtatcctgggaaactggtatatctatgagatttgaagtttatggctgcaagataacagattatccttgctctggaatgttgggcatggtgtctggacttatttcagactcccagattacagcatccaatcaagccgacaggaattggatgccagaaaacatccgtctggtgaccagtcgtaccggctgggcactgccaccctcaccccacccatacaccaatgaatggctccaagtggacctgggagatgagaagatagtaagaggtgtcatcattcagggtgggaagcaccgagaaaacaaggtgttcatgaggaagttcaagatcgcctatagtaacaatggctctgactggaaaactatcatggatgacagcaagcgcaaggctaagtcgttcgaaggcaacaacaactatgacacacctgagcttcggacgttttcacctctctccacaaggttcatcaggatctaccctgagagagccacacacagtgggcttgggctgaggatggagctactgggctgtgaagtggaaggtaactacagttcccagagtctctcctgctttcttcctttctatttattttctcttgcattttatccctctgactgtactgtgttcccgacatacggttttaactgcgagtttggctggggctctcacaagacattctgccactgggagcatgacagccatgcacagctcaggtggagtgtgctgaccagcaagacagggccgattcaggaccatacaggagatggcaacttcatctattcccaagctgatgaaaatcagaaaggcaaagtagcccgcctggtgagccctgtggtctattcccagagctctgcccactgtatgaccttctggtatcacatgtccggctctcatgtgggtacactgagggtcaaactacgctaccagaagccagaggaatatgatcaactggtctggatggtggttgggcaccaaggagaccactggaaagaaggacgtgtcttgctgcacaaatctctgaaactatatcaggttatttttgaaggtgaaatcggaaaaggaaaccttggtggaattgctgtggatgatatcagtattaacaaccatatttctcaggaagactgtgcaagtaaggatgggtttgggctggaagtaaacaaagcccttagccctggcaggatccttagcatcactccaggatatgaaggagaaggggaaggtgacaagaacatctccaggaagccaggcaatgtgcttaagaccctggatcccatcctgatcaccatcatagccatgagtgccctgggagtactcctgggtgcagtctgtggagttgtgctgtactgtgcctgttggcacaatgggatgtcagaaaggaacctatctgccctggagaactataactttgaacttgtggatggtgtaaagttgaaaaaagataaactgaacccacagagtaattactcagaggcgtga

SEQ ID NO: 1882 - protein, 873 aa, Mus musculus
DKCGGTIKIENPGYLTSPGYPHSYHPSEKCEWLIQAPEPYQRIMINFNPHFDLEDRDCKYDYVEVIDGENEGGRLWGKFCGKIAPSPVVSSGPFLFIKFVSDYETHGAGFSIRYEIFKRGPECSQNYTAPTGVIKSPGFPEKYPNSLECTYIIFAPKMSEIILEFESFDLEQDSNPPGGMFCRYDRLEIWDGFPEVGPHIGRYCGQKTPGRIRSSSGVLSMVFYTDSAIAKEGFSANYSVLQSSISEDFKCMEALGMESGEIHSDQITASSQYGTNWSVERSRLNYPENGWTPGEDSYKEWIQVDLGLLRFVTAVGTQGAISKETKKKYYVKTYRVDISSNGEDWISLKEGNKAIIFQGNTNPTDVVLGVFSKPLITRFVRIKPVSWETGISMRFEVYGCKITDYPCSGMLGMVSGLISDSQITASNQADRNWMPENIRLVTSRTGWALPPSPHPYTNEWLQVDLGDEKIVRGVIIQGGKHRENKVFMRKFKIAYSNNGSDWKTIMDDSKRKAKSFEGNNNYDTPELRTFSPLSTRFIRIYPERATHSGLGLRMELLGCEVEGNYSSQSLSCFLPFYLFSLAFYPSDCTVFPTYGFNCEFGWGSHKTFCHWEHDSHAQLRWSVLTSKTGPIQDHTGDGNFIYSQADENQKGKVARLVSPVVYSQSSAHCMTFWYHMSGSHVGTLRVKLRYQKPEEYDQLVWMVVGHQGDHWKEGRVLLHKSLKLYQVIFEGEIGKGNLGGIAVDDISINNHISQEDCASKDGFGLEVNKALSPGRILSITPGYEGEGEGDKNISRKPGNVLKTLDPILITIIAMSALGVLLGAVCGVVLYCACWHNGMSERNLSALENYNFELVDGVKLKKDKLNPQSNYSEA

SEQ ID NO: 1883 - DNA, 1880 bp, Homo sapiens
cgaaggaggatccggagcagctgctgccagcccgcgggcactgaagtcctcccggctgccgctcgagtagccacgggcgcgatcgggaccagaagtctcctcctccatgatcactttggaagccgggggaagactttgccctgccctgagagctggtctgcgtttcccaggcgcggcggcggcggagcagcagctgcagcagccgagtccaaataggagcggccacagccaggggcgtgagcgccccgcgcggagcgagctcgggttcccctcggaatgtccccggggcgcccggcgcgctgaccccgaagccgcctccgccttcggcgcctgctgcctccctcggccaggcttgttgttcgggactgtgagcttcctggctcctgggcagtggggaagcccccgggggcgagtgacttcagctggccacgacccagccctcccccgtgcgtatctcgcttaagatggcagcggagtcaggggaactaatcggggcttgtgagttcatgaaagatcggttatattttgctactttaaggaatagaccaaaaagcacagtaaatacccactatttctccatcgatgaggagctggtctatgaaaatttctatgcagattttggaccgctgaacttggcaatggtgtacagatattgctgcaaactaaacaagaaactaaaatcatacagtttgtcaagaaagaaaatagtgcactacacctgttttgaccaacggaaaagagcaaatgcagcatttttgataggtgcctatgcagtaatctatttaaagaagacaccagaagaagcctacagagcactcctgtctggctcaaaccccccctatcttccattcagggatgcttcctttggaaattgcacttacaatctcaccattctcgactgtttgcagggaatcagaaagggattacaacatggattttttgactttgagacatttgatgtggatgaatatgaacattatgagcgagttgaaaatggtgacttcaactggattgttccaggaaaatttttagcatttagtggaccacatcctaaaagcaaaattgagaatggttatcctcttcacgcccctgaagcctactttccttatttcaaaaagcataatgtgactgcagttgtgaggctaaacaaaaagatttatgaggcaaagcgcttcacagacgctggcttcgagcactatgacctcttcttcatagatggcagcacacccagtgacaacatcgtgcgaaggttcctgaacatctgtgagaacaccgaaggggccatcgccgttcactgcaaagctggtcttggaagaacagggacattgatagcctgttatgtaatgaaacactacaggtttacacatgctgaaataattgcttggattagaatatgccggccaggctctattataggaccccagcagcacttcctggaagaaaaacaagcatcgttgtgggtccaaggagacattttccgatccaaactgaaaaatcgaccatccagtgaaggaagtattaataaaattctttctggcctagatgatatgtctattggtggaaatctttcaaaaacacaaaacatggaacgatttggagaggtaagttttccctaggagattctatcttcttaaaactgatgttctgcatttgtttctcagttggacctatataacatagcagtgtcttttctctggatgccacgagtaccaagtttttagaagtagagccatccgtctatatagcaagaagcagaggaaagaaaccaattgcccttaaaaaaaaaaaagctataatttaaggagtaaattataaaggaggctactctggtaaggggtaatatttatagaaaggaaacagaaaagcaaactttctatttg

SEQ ID NO: 1884 - protein, 383 aa, Homo sapiens
MAAESGELIGACEFMKDRLYFATLRNRPKSTVNTHYFSIDEELVYENFYADFGPLNLAMVYRYCCKLNKKLKSYSLSRKKIVHYTCFDQRKRANAAFLIGAYAVIYLKKTPEEAYRALLSGSNPPYLPFRDASFGNCTYNLTILDCLQGIRKGLQHGFFDFETFDVDEYEHYERVENGDFNWIVPGKFLAFSGPHPKSKIENGYPLHAPEAYFPYFKKHNVTAVVRLNKKIYEAKRFTDAGFEHYDLFFIDGSTPSDNIVRRFLNICENTEGAIAVHCKAGLGRTGTLIACYVMKHYRFTHAEIIAWIRICRPGSIIGPQQHFLEEKQASLWVQGDIFRSKLKNRPSSEGSINKILSGLDDMSIGGNLSKTQNMERFGEVSFP

SEQ ID NO: 1885 - DNA, 2415 bp, Homo sapiens
cgaaggaggatccggagcagctgctgccagcccgcgggcactgaagtcctcccggctgccgctcgagtagccacgggcgcgatcgggaccagaagtctcctcctccatgatcactttggaagccgggggaagactttgccctgccctgagagctggtctgcgtttcccaggcgcggcggcggcggagcagcagctgcagcagccgagtccaaataggagcggccacagccaggggcgtgagcgccccgcgcggagcgagctcgggttcccctcggaatgtccccggggcgcccggcgcgctgaccccgaagccgcctccgccttcggcgcctgctgcctccctcggccaggcttgttgttcgggactgtgagcttcctggctcctgggcagtggggaagcccccgggggcgagtgacttcagctggccacgacccagccctcccccgtgcgtatctcgcttaagatggcagcggagtcaggggaactaatcggggcttgtgagttcatgaaagatcggttatattttgctactttaaggaatagaccaaaaagcacagtaaatacccactatttctccatcgatgaggagctggtctatgaaaatttctatgcagattttggaccgctgaacttggcaatggtgtacagatattgctgcaaactaaacaagaaactaaaatcatacagtttgtcaagaaagaaaatagtgcactacacctgttttgaccaacggaaaagagcaaatgcagcatttttgataggtgcctatgcagtaatctatttaaagaagacaccagaagaagcctacagagcactcctgtctggctcaaaccccccctatcttccattcagggatgcttcctttggaaattgcacttacaatctcaccattctcgactgtttgcagggaatcagaaagggattacaacatggattttttgactttgagacatttgatgtggatgaatatgaacattatgagcgagttgaaaatggtgacttcaactggattgttccaggaaaatttttagcatttagtggaccacatcctaaaagcaaaattgagaatggttatcctcttcacgcccctgaagcctactttccttatttcaaaaagcataatgtgactgcagttgtgaggctaaacaaaaagatttatgaggcaaagcgcttcacagacgctggcttcgagcactatgacctcttcttcatagatggcagcacacccagtgacaacatcgtgcgaaggttcctgaacatctgtgagaacaccgaaggggccatcgccgttcactgcaaagctggtcttggaagaacagggacattgatagcctgttatgtaatgaaacactacaggtttacacatgctgaaataattgcttggattagaatatgccggccaggctctattataggaccccagcagcacttcctggaagaaaaacaagcatcgttgtgggtccaaggagacattttccgatccaaactgaaaaatcgaccatccagtgaaggaagtattaataaaattctttctggcctagatgatatgtctattggtggaaatctttcaaaaacacaaaacatggaacgatttggagaggataacttagaagatgatgatgtggaaatgaaaaatggtataacccagggagacaaactacgtgccttaaaaagtcagagacagccacgtacctcaccatcctgtgcatttaggtcagatgatacaaaaggacatccaagagcagtgtcccagcctttcagattaagttcatccctgcaaggatctgcagttactttgaagacatcaaaaatggcactgtccccttcagcaacggccaagaggatcaacagaacttctttgtcttcgggtgccactgtaagaagcttttccataaactcccggctagccagttctctagggaacttgaatgctgcaacagatgatccagagaacaaaaagacctcctcatcctctaaggcaggcttcacagccagcccgtttaccaacctcttgaatggcagctcccagccaactaccagaaattaccctgagctcaacaataatcagtacaacagaagcagcaacagcaacgggggcaacctgaacagccccccaggcccccacagcgccaagacagaggagcacaccaccatcctccgaccctcctacaccgggctttcttcttcttcagcgagattcctgagccgttctatccctgtaagtgcgcagacaccacctcctggtcctcagaaccctgaatgcaacttctgtgccttgccttcccagccgaggctgccaccaaagaaatttaatagtgccaaggaagccttctgagcgatgccttccctctgtgctgtgaaactgtctatgcactacattctgctagctcctcttcaagtaaacgccaagtcac

SEQ ID NO: 1886 - protein, 623 aa, Homo sapiens
MAAESGELIGACEFMKDRLYFATLRNRPKSTVNTHYFSIDEELVYENFYADFGPLNLAMVYRYCCKLNKKLKSYSLSRKKIVHYTCFDQRKRANAAFLIGAYAVIYLKKTPEEAYRALLSGSNPPYLPFRDASFGNCTYNLTILDCLQGIRKGLQHGFFDFETFDVDEYEHYERVENGDFNWIVPGKFLAFSGPHPKSKIENGYPLHAPEAYFPYFKKHNVTAVVRLNKKIYEAKRFTDAGFEHYDLFFIDGSTPSDNIVRRFLNICENTEGAIAVHCKAGLGRTGTLIACYVMKHYRFTHAEIIAWIRICRPGSIIGPQQHFLEEKQASLWVQGDIFRSKLKNRPSSEGSINKILSGLDDMSIGGNLSKTQNMERFGEDNLEDDDVEMKNGITQGDKLRALKSQRQPRTSPSCAFRSDDTKGHPRAVSQPFRLSSSLQGSAVTLKTSKMALSPSATAKRINRTSLSSGATVRSFSINSRLASSLGNLNAATDDPENKKTSSSSKAGFTASPFTNLLNGSSQPTTRNYPELNNNQYNRSSNSNGGNLNSPPGPHSAKTEEHTTILRPSYTGLSSSSARFLSRSIPVSAQTPPPGPQNPECNFCALPSQPRLPPKKFNSAKEAF

SEQ ID NO: 1887 - DNA, 4245 bp, Homo sapiens
cgaaggaggatccggagcagctgctgccagcccgcgggcactgaagtcctcccggctgccgctcgagtagccacgggcgcgatcgggaccagaagtctcctcctccatgatcactttggaagccgggggaagactttgccctgccctgagagctggtctgcgtttcccaggcgcggcggcggcggagcagcagctgcagcagccgagtccaaataggagcggccacagccaggggcgtgagcgccccgcgcggagcgagctcgggttcccctcggaatgtccccggggcgcccggcgcgctgaccccgaagccgcctccgccttcggcgcctgctgcctccctcggccaggcttgttgttcgggactgtgagcttcctggctcctgggcagtggggaagcccccgggggcgagtgacttcagctggccacgacccagccctcccccgtgcgtatctcgcttaagatggcagcggagtcaggggaactaatcggggcttgtgagttcatgaaagatcggttatattttgctactttaaggaatagaccaaaaagcacagtaaatacccactatttctccatcgatgaggagctggtctatgaaaatttctatgcagattttggaccgctgaacttggcaatggtgtacagatattgctgcaaactaaacaagaaactaaaatcatacagtttgtcaagaaagaaaatagtgcactacacctgttttgaccaacggaaaagagcaaatgcagcatttttgataggtgcctatgcagtaatctatttaaagaagacaccagaagaagcctacagagcactcctgtctggctcaaaccccccctatcttccattcagggatgcttcctttggaaattgcacttacaatctcaccattctcgactgtttgcagggaatcagaaagggattacaacatggattttttgactttgagacatttgatgtggatgaatatgaacattatgagcgagttgaaaatggtgacttcaactggattgttccaggaaaatttttagcatttagtggaccacatcctaaaagcaaaattgagaatggttatcctcttcacgcccctgaagcctactttccttatttcaaaaagcataatgtgactgcagttgtgaggctaaacaaaaagatttatgaggcaaagcgcttcacagacgctggcttcgagcactatgacctcttcttcatagatggcagcacacccagtgacaacatcgtgcgaaggttcctgaacatctgtgagaacaccgaaggggccatcgccgttcactgcaaagctggtcttggaagaacagggacattgatagcctgttatgtaatgaaacactacaggtttacacatgctgaaataattgcttggattagaatatgccggccaggctctattataggaccccagcagcacttcctggaagaaaaacaagcatcgttgtgggtccaaggagacattttccgatccaaactgaaaaatcgaccatccagtgaaggaagtattaataaaattctttctggcctagatgatatgtctattggtggaaatctttcaaaaacacaaaacatggaacgatttggagaggataacttagaagatgatgatgtggaaatgaaaaatggtataacccagggagacaaactacgtgccttaaaaagtcagagacagccacgtacctcaccatcctgtgcatttaggtcagatgatacaaaaggacatccaagagcagtgtcccagcctttcagattaagttcatccctgcaaggatctgcagttactttgaagacatcaaaaatggcactgtccccttcagcaacggccaagaggatcaacagaacttctttgtcttcgggtgccactgtaagaagcttttccataaactcccggctagccagttctctagggaacttgaatgctgcaacagatgatccagagaacaaaaagacctcctcatcctctaaggcaggcttcacagccagcccgtttaccaacctcttgaatggcagctcccagccaactaccagaaattaccctgagctcaacaataatcagtacaacagaagcagcaacagcaacgggggcaacctgaacagccccccaggcccccacagcgccaagacagaggagcacaccaccatcctccgaccctcctacaccgggctttcttcttcttcagcgagattcctgagccgttctatcccttcccttcagtctgaatatgttcattactaaggccttgccactccagtgaaagctgttcttctcttagacacaatttcttcatctggacgagcagtggagagggaaagcaacttcttgctggaagaatatctctgccttcttaccttaaattaaaaagagcactaagataacaccttcaagagacttgaaaacagaaaactggttaatgactactataaatgcactgaaactatgtttatggagatttccatacttttaaagacagttttaatgttgaatttggtattttgaagggttatttttaatgtattttggtaatacatttattattatatttacatgtacagtgttacattatatatgtattgtgaactttaaaagactattttgataaatttataaatatataaaattatgtaaaaactacactatattttgatttagattttcctgctgtttgctaccaaaaatttgtattttaaatctgtttagttttagtatggttttgtctctaatgaataaataattccttcttattaagaagaagtaagggagaaagtttttagaaagtgatttttatgctcgcactataaatatggcaggtcagttcattcttttgggaagtcagtttagttacactgagtttatccaagtttatctctaccaagagtataatggcatgggatggcttatttaggacaattccctttcctattgtttttgttgctgagccaatttgagttagttttgcatcctggggggctttaaaatacagcatgcagtgaaagatcagaattcactgaatatttcttctgagagcatggtttcatggtttttctctatgaaatgactcaatattccaaatgtttttttttccttcctcctttcaaaagagttcttaacccaattaggatatcctgctttgggtatgaggttgttgttgcctgtaatcacacatggtttgacatcagttttaaatcaatggagagaaaaaactgaaaaagatgctgctaagtagttctctgtattaaaggagatatttttaaaacagggtacaaccccctgctgcacacgctagcatatctggaacctactatgaaaatgaaaggacccttataggtactcacagccctttcatgtaagtatgatctgatatttaggtcttcagaagcctgtaggtttcatttctatgaggaatcgaggagcgttacatcctgatatccttccaggctgcttaagaatggactgcttcgacactgaaagtgctagttaaatggattcatatgaagtgctttactcccaaccattgagttatttataatgtatttattaggggagggtaccttgagtctattatatatgcttcatcaaaacatcttgttcatgttttatgtttttaaaaaaggcatttgaatgaatgtttgactcaggtttgttaaattaaccttcagtaactgcagtaccaaaaattacactcaactgatgaaaaaaacgaattgtatgatttaggaatcaaaaactaaaataagtggaattatgtatcttttctaaagttaaaaaagtaaaatattttattatgagttattataaaaattggttaattgtataggaagatgacagtatttttttcaagttatcataaaaagtaattcagatgacatttgagaagtaggggaaagggaatcatgttgacagttttagttctgtgaacactaatttgtgtgaagctattaaaatgattgtaaagttgactactgtaaatttcccataattatgtgtgtatatgtgtcatatgtatgtacatgtatatgtctaaaaattactttacacatgtgcctacatagacacaccaagaagtggatgtatataatatagaaagtatatagcaaagtaattttactctgataataaaaattgtttgacatgtattttgttatgaatagtttatcttccaaaagatattttgctctattttaaagtgtagaagaatacactgctaataaataataaaagttttattcaattt

SEQ ID NO: 1888 - protein, 594 aa, Homo sapiens
MAAESGELIGACEFMKDRLYFATLRNRPKSTVNTHYFSIDEELVYENFYADFGPLNLAMVYRYCCKLNKKLKSYSLSRKKIVHYTCFDQRKRANAAFLIGAYAVIYLKKTPEEAYRALLSGSNPPYLPFRDASFGNCTYNLTILDCLQGIRKGLQHGFFDFETFDVDEYEHYERVENGDFNWIVPGKFLAFSGPHPKSKIENGYPLHAPEAYFPYFKKHNVTAVVRLNKKIYEAKRFTDAGFEHYDLFFIDGSTPSDNIVRRFLNICENTEGAIAVHCKAGLGRTGTLIACYVMKHYRFTHAEIIAWIRICRPGSIIGPQQHFLEEKQASLWVQGDIFRSKLKNRPSSEGSINKILSGLDDMSIGGNLSKTQNMERFGEDNLEDDDVEMKNGITQGDKLRALKSQRQPRTSPSCAFRSDDTKGHPRAVSQPFRLSSSLQGSAVTLKTSKMALSPSATAKRINRTSLSSGATVRSFSINSRLASSLGNLNAATDDPENKKTSSSSKAGFTASPFTNLLNGSSQPTTRNYPELNNNQYNRSSNSNGGNLNSPPGPHSAKTEEHTTILRPSYTGLSSSSARFLSRSIPSLQSEYVHY

SEQ ID NO: 1889 - DNA, 1697 bp, Homo sapiens
atggcagcggagtcaggggaactaatcggggcttgtgagttcatgaaagatcggttatattttgctactttaaggaatagaccaaaaagcacagtaaatacccactatttctccatcgatgaggagctggtctatgaaaatttctatgcagattttggaccgctgaacttggcaatggtgtacagatattgctgcaaactaaacaagaaactaaaatcatacagtttgtcaagaaagaaaatagtgcactacacctgttttgaccaacggaaaagagcaaatgcagcatttttgataggtgcctatgcagtaatctatttaaagaagacaccagaagaagcctacagagcactcctgtctggctcaaaccccccctatcttccattcagggatgcttcctttggaaattgcacttacaatctcaccattctcgactgtttgcagggaatcagaaagggattacaacatggattttttgactttgagacatttgatgtggatgaatatgaacattatgaggttatcctcttcacgcccctgaagcctactttccttatttcaaaaagcataatgtgactgcagttgtgaggctaaacaaaaagatttatgaggcaaagcgcttcacagacgctggcttcgagcactatgacctcttcttcatagatggcagcacacccagtgacaacatcgtgcgaaggttcctgaacatctgtgagaacaccgaaggggccatcgccgttcactgcaaagctggtcttggaagaacagggacattgatagcctgttatgtaatgaaacactacaggtttacacatgctgaaataattgcttggattagaatatgccggccaggctctattataggaccccagcagcacttcctggaagaaaaacaagcatcgttgtgggtccaaggagacattttccgatccaaactgaaaaatcgaccatccagtgaaggaagtattaataaaattctttctggcctagatgatatgtctattggtggaaatctttcaaaaacacaaaacatggaacgatttggagaggataacttagaagatgatgatgtggaaatgaaaaatggtataacccagggagacaaactacgtgccttaaaaagtcagagacagccacgtacctcaccatcctgtgcatttaggtcagatgatacaaaaggacatccaagagcagtgtcccagcctttcagattaagttcatccctgcaaggatctgcagttactttgaagacatcaaaaatggcactgtccccttcagcaacggccaagaggatcaacagaacttctttgtcttcgggtgccactgtaagaagcttttccataaactcccggctagccagttctctagggaacttgaatgctgcaacagatgatccagagaacaaaaagacctcctcatcctctaaggcaggcttcacagccagcccgtttaccaacctcttgaatggcagctcccagccaactaccagaaattaccctgagctcaacaataatcagtacaacagaagcagcaacagcaacgggggcaacctgaacagccccccaggcccccacagcgccaagacagaggagcacaccaccatcctccgaccctcctacaccgggctttcttcttcttcagcgagattcctgagccgttctatcccttcccttcagtctgaatatgttcattactaa

SEQ ID NO: 1890 - protein, 191 aa, Homo sapiens
MAAESGELIGACEFMKDRLYFATLRNRPKSTVNTHYFSIDEELVYENFYADFGPLNLAMVYRYCCKLNKKLKSYSLSRKKIVHYTCFDQRKRANAAFLIGAYAVIYLKKTPEEAYRALLSGSNPPYLPFRDASFGNCTYNLTILDCLQGIRKGLQHGFFDFETFDVDEYEHYEVILFTPLKPTFLISKSIM

SEQ ID NO: 1891 - DNA, 2574 bp, Homo sapiens
gcaaaaagcgtgggcagttggagaagaagcagccagagtgtgaagaagcccacggaaggaaagtccagggaggaggaaaagaagcagaagttttggcatctgttccctggctgtgccaagatgggcgattggagcttcctgggaaatttcctggaggaagtacacaagcactcgaccgtggtaggcaaggtctggctcactgtcctcttcatattccgtatgctcgtgctgggcacagctgctgagtcttcctggggggatgagcaggctgatttccggtgtgatacgattcagcctggctgccagaatgtctgctacgaccaggctttccccatctcccacattcgctactgggtgctgcagatcatcttcgtctccacgccctctctggtgtacatgggccacgccatgcacactgtgcgcatgcaggagaagcgcaagctacgggaggccgagagggccaaagaggtccggggctctggctcttacgagtacccggtggcagagaaggcagaactgtcctgctgggaggaagggaatggaaggattgccctccagggcactctgctcaacacctatgtgtgcagcatcctgatccgcaccaccatggaggtgggcttcattgtgggccagtacttcatctacggaatcttcctgaccaccctgcatgtctgccgcaggagtccctgtccccacccggtcaactgttacgtatcccggcccacagagaagaatgtcttcattgtctttatgctggctgtggctgcactgtccctcctccttagcctggctgaactctaccacctgggctggaagaagatcagacagcgatttgtcaaaccgcggcagcacatggctaagtgccagctttctggcccctctgtgggcatagtccagagctgcacaccaccccccgactttaatcagtgcctggagaatggccctgggggaaaattcttcaatcccttcagcaataatatggcctcccaacaaaacacagacaacctggtcaccgagcaagtacgaggtcaggagcagactcctggggaaggtttcatccaggttcgttatggccagaagcctgaggtgcccaatggagtctcaccaggtcaccgccttccccatggctatcatagtgacaagcgacgtcttagtaaggccagcagcaaggcaaggtcagatgacctatcagtgtgaccctcctttatgggaggatcaggaccaggtgggaacaaaggaggctcagagaagaaagacgtgtcccttctgaactgatgctttctcactgtcatcactgcttggctcctttgagccccgggtctcaatgacgttgctcattaattctagaaactataaccagggctctgggatagtaagagaggtgacaacccacccagactgcagttccctccccaccctctacccagtatacgaagcctttcagattactcatgaaacagggtagagggaaagaagggaagcatggcaaaagctggcctggaagggatagccagagggatagaatgactctctctctacataccagcagcataccaaatgcgttctctaagttcctacctccttgacctgatcaccctccctcctccaaggaagagctcaaagttcccagccaatagacagcatgaatcaaggaacttgcattatatgtgctcttgaatctgttgtctccatggaccattcctcggagtagtggtgagatggccttgggttgcccttggcttctcctccctctactcagccttaaaaagggcttcttggaactttaccagcagcctcagctttacaaatgccttggtatgtacctctggcaaatgccccaccttggtgatgttgcaacctttccttctgctagggtgtacacctagcctgtgcaggtgtcagccctgctagggagtcactgtacacacaaactctactggaattcctgccaacatctgtcaccctgcagctcctttacagttcaatccaatgatagaaaccatcccttccctttctcccttggctgttcacccagccattccctgaaggccttaccaacaggaatatccaagaagctgttgtcccctctcgaaccctgaccagatcatcagccactgaggccagtggaatttccccaggccttgttaaaacaaagaaagcattgtacctctcagattccccttgtggaaaaaaaaattctgctgtgaagatgaaaataaaaatggagagaaaacactggaaaactattttcccctcctatttacttcctttgctgactgccaacttagtgccaagaggaggtgtgatgacagctatggaggcccccagatctctctctcctggaggctttagcaggggcaaggaaatagtaggggaatctccagctctcttggcagggcctttatttaaagagcgcagagattcctatgtctccctagtgcccctaatgagactgccaagtgggggctgtagaaaagccttgccttccccagggattggcctggtctctgtattcactggatccataatgggttgctgttgttttggatgaaggtaaacgatgcttggaattgg

SEQ ID NO: 1892 - protein, 358 aa, Homo sapiens
MGDWSFLGNFLEEVHKHSTVVGKVWLTVLFIFRMLVLGTAAESSWGDEQADFRCDTIQPGCQNVCYDQAFPISHIRYWVLQIIFVSTPSLVYMGHAMHTVRMQEKRKLREAERAKEVRGSGSYEYPVAEKAELSCWEEGNGRIALQGTLLNTYVCSILIRTTMEVGFIVGQYFIYGIFLTTLHVCRRSPCPHPVNCYVSRPTEKNVFIVFMLAVAALSLLLSLAELYHLGWKKIRQRFVKPRQHMAKCQLSGPSVGIVQSCTPPPDFNQCLENGPGGKFFNPFSNNMASQQNTDNLVTEQVRGQEQTPGEGFIQVRYGQKPEVPNGVSPGHRLPHGYHSDKRRLSKASSKARSDDLSV

SEQ ID NO: 1893 - DNA, 1853 bp, Homo sapiens
cacagggactgcgctcccgtgcccctagcgctcccgcgctgctgctccagccgcccggcagctctgaggatggagaggagggcgcggagctcctccagggagtcccgcgggcgaggcggcaggactccgcacaaggagaacaagagggcaaaggccgagaggagcggcggaggccgcgggcgccaggaggctgggcccgagccgtcgggctccggacgggcggggaccccgggggagccccgagcgcccgccgccacggtggtggacgtggatgaggtccgaggctccggcgaggagggcaccgaggtggtggcgctgttggagagcgagcggcccgaggaaggtaccaaatcctccggcttaggggcctgtgagtggcttcttgtcctcatttccctgctcttcatcatcatgaccttccctttttccatctggttctgcgtaaaggttgtacaagagtatgaaagagtaattatattccgactgggacatctgcttcctggaagagccaaaggccctggtcttttcttttttttgccctgcctggatacctaccacaaggttgaccttcgtctccaaactctggagataccttttcatgagatcgtgaccaaagacatgtttataatggagatagatgccatttgctactaccgaatggaaaatgcctctcttctcctaagcagtcttgctcatgtatctaaagctgtgcaattccttgtgcaaaccactatgaagcgtctcctagcacatcgatccctcactgaaattcttctagagaggaagagcatcgcccaagatgcaaaggttgccttggattcagtgacctgtatttggggaatcaaagtggagagaatagaaattaaagatgtgaggttgccagctgggcttcagcactcactggctgtggaggctgaagcgcaaagacaagccaaagtgcggatgattgctgcagaagcggaaaaggctgcttctgagtccctgaggatggcagctgagattctgtcaggcacccctgctgccgttcagcttcgatacctccacacccttcagtctctgtccacagagaagccttccactgtggttttacctttgccatttgacctactgaattgcctgtcttctcccagcaacagaactcagggaagcctccccttcccaagtccttccaaacctgttgagccactaaatcctaaaaagaaagactctcccatgttataggaaggatggggcataatgtgactgtaaaggggcctgccatagaaaagtcacatgcctgagggagacactctgtcctcattccctgcccttcctttggttgccatatggaatggccatggaatgcacgaagtcacaatgcaccatccatgagaagacggtgaaatgatgtaatgacagagaaggcagacaacatgtttccgtgactcatctagtcagagcaattatgggaaacagctttggtcaacattctactttggaaagaattttgagtctagatgtggttaaattttgacttctgggaacttggttcagatgtccctttcactgtatgtcctctgacccctttggcaaggttgccacagctcccacagcccttcctacaagcacctatcattgggcttgtcacactctattgctcttctgtcccaaagatgcagtcttctctccaatgatactaccaagtcttagttttcctcaaccacactcaatctttttgctccaccctgaattcctcacacctaaccctgatagttacctaaagtgacacttaaatgtttcagagtgaatgcaaaaaagagagatgtacttggagtcggatatacaatttatccctaattaaagcatttaaaagg

SEQ ID NO: 1894 - protein, 383 aa, Homo sapiens
MERRARSSSRESRGRGGRTPHKENKRAKAERSGGGRGRQEAGPEPSGSGRAGTPGEPRAPAATVVDVDEVRGSGEEGTEVVALLESERPEEGTKSSGLGACEWLLVLISLLFIIMTFPFSIWFCVKVVQEYERVIIFRLGHLLPGRAKGPGLFFFLPCLDTYHKVDLRLQTLEIPFHEIVTKDMFIMEIDAICYYRMENASLLLSSLAHVSKAVQFLVQTTMKRLLAHRSLTEILLERKSIAQDAKVALDSVTCIWGIKVERIEIKDVRLPAGLQHSLAVEAEAQRQAKVRMIAAEAEKAASESLRMAAEILSGTPAAVQLRYLHTLQSLSTEKPSTVVLPLPFDLLNCLSSPSNRTQGSLPFPSPSKPVEPLNPKKKDSPML

SEQ ID NO: 1895 - DNA, 1668 bp, Homo sapiens
cgcggacccgcagcgactccacagggactgcgctcccgtgcccctagcgctcccgcgctgctgctccagccgcccggcagctctgaggatggagaggagggcgcggagctcctccagggagtcccgcgggcgaggcggcaggactccgcacaaggagaacaagagggcaaaggccgagaggagcggcggaggccgcgggcgccaggaggctgggcccgagccgtcgggctccggacgggcggggaccccgggggagccccgagcgcccgccgccacggtggtggacgtggatgaggtccgaggctccggcgaggagggcaccgaggtggtggcgctgttggagagcgagcggcccgaggaaggtaccaaatcctccggcttaggggcctgtgagtggcttcttgtcctcatttccctgctcttcatcatcatgaccttccctttttccatctggttctgcgtaaaggttgtacaagagtatgaaagagtaattatattccgactgggacatctgcttcctggaagagccaaaggccctggtcttttcttttttttgccctgcctggatacctaccacaaggttgaccttcgtctccaaactctggagataccttttcatgaggttgccttggattcagtgacctgtatttggggaatcaaagtggagagaatagaaattaaagatgtgaggttgccagctgggcttcagcactcactggctgtggaggctgaagcgcaaagacaagccaaagtgcggatgattgctgcagaagcggaaaaggctgcttctgagtccctgaggatggcagctgagattctgtcaggcacccctgctgccgttcagcttcgatacctccacacccttcagtctctgtccacagagaagccttccactgtggttttacctttgccatttgacctactgaattgcctgtcttctcccagcaacagaactcagggaagcctccccttcccaagtccttccaaacctgttgagccactaaatcctaaaaagaaagactctcccatgttataggaaggatggggcataatgtgactgtaaaggggcctgccatagaaaagtcacatgcctgagggagacactctgtcctcattccctgcccttcctttggttgccatatggaatggccatggaatgcacgaagtcacaatgcaccatccatgagaagacggtgaaatgatgtaatgacagagaaggcagacaacatgtttccgtgactcatctagtcagagcaattatgggaaacagctttggtcaacattctactttggaaagaattttgagtctagatgtggttaaattttgacttctgggaacttggttcagatgtccctttcactgtatgtcctctgacccctttggcaaggttgccacagctcccacagcccttcctacaagcacctatcattgggcttgtcacactctattgctcttctgtcccaaagatgcagtcttctctccaatgatactaccaagtcttagttttcctcaaccacactcaatctttttgctccaccctgaattcctcacacctaaccctgatagttacctaaagtgacacttaaatgtttcagagtgaatgcaaaaaagagagatgtacttggagtcggatatacaatttatccctaattaaagcatttaaaagg

SEQ ID NO: 1896 - protein, 315 aa, Homo sapiens
MERRARSSSRESRGRGGRTPHKENKRAKAERSGGGRGRQEAGPEPSGSGRAGTPGEPRAPAATVVDVDEVRGSGEEGTEVVALLESERPEEGTKSSGLGACEWLLVLISLLFIIMTFPFSIWFCVKVVQEYERVIIFRLGHLLPGRAKGPGLFFFLPCLDTYHKVDLRLQTLEIPFHEVALDSVTCIWGIKVERIEIKDVRLPAGLQHSLAVEAEAQRQAKVRMIAAEAEKAASESLRMAAEILSGTPAAVQLRYLHTLQSLSTEKPSTVVLPLPFDLLNCLSSPSNRTQGSLPFPSPSKPVEPLNPKKKDSPML

SEQ ID NO: 1897 - DNA, 1461 bp, Homo sapiens
agaacctcagtggatctcagagagagccccagactgagggaagcatggatggatggagaaggatgcctcgctggggactgctgctgctgctctggggctcctgtacctttggtctcccgacagacaccaccacctttaaacggatcttcctcaagagaatgccctcaatccgagaaagcctgaaggaacgaggtgtggacatggccaggcttggtcccgagtggagccaacccatgaagaggctgacacttggcaacaccacctcctccgtgatcctcaccaactacatggacacccagtactatggcgagattggcatcggcaccccaccccagaccttcaaagtcgtctttgacactggttcgtccaatgtttgggtgccctcctccaagtgcagccgtctctacactgcctgtgtgtatcacaagctcttcgatgcttcggattcctccagctacaagcacaatggaacagaactcaccctccgctattcaacagggacagtcagtggctttctcagccaggacatcatcaccgtgggtggaatcacggtgacacagatgtttggagaggtcacggagatgcccgccttacccttcatgctggccgagtttgatggggttgtgggcatgggcttcattgaacaggccattggcagggtcacccctatcttcgacaacatcatctcccaaggggtgctaaaagaggacgtcttctctttctactacaacagagatggggagaattcccaatcgctgggaggacagattgtgctgggaggcagcgacccccagcattacgaagggaatttccactatatcaacctcatcaagactggtgtctggcagattcaaatgaagggggtgtctgtggggtcatccaccttgctctgtgaagacggctgcctggcattggtagacaccggtgcatcctacatctcaggttctaccagctccatagagaagctcatggaggccttgggagccaagaagaggctgtttgattatgtcgtgaagtgtaacgagggccctacactccccgacatctctttccacctgggaggcaaagaatacacgctcaccagcgcggactatgtatttcaggaatcctacagtagtaaaaagctgtgcacactggccatccacgccatggatatcccgccacccactggacccacctgggccctgggggccaccttcatccgaaagttctacacagagtttgatcggcgtaacaaccgcattggcttcgccttggcccgctgaggccctctgccacccaggcaggccctgccttcagccctggcccagagctggaacactctctgagatgcccctctgcctgggcttatgccctcagatggagacattggatgtggagctcctgctggatgcgtgccctgacccctgcaccagcccttccctgctttgaggacaaagagaataaagacttcatgttcac

SEQ ID NO: 1898 - protein, 406 aa, Homo sapiens
MDGWRRMPRWGLLLLLWGSCTFGLPTDTTTFKRIFLKRMPSIRESLKERGVDMARLGPEWSQPMKRLTLGNTTSSVILTNYMDTQYYGEIGIGTPPQTFKVVFDTGSSNVWVPSSKCSRLYTACVYHKLFDASDSSSYKHNGTELTLRYSTGTVSGFLSQDIITVGGITVTQMFGEVTEMPALPFMLAEFDGVVGMGFIEQAIGRVTPIFDNIISQGVLKEDVFSFYYNRDGENSQSLGGQIVLGGSDPQHYEGNFHYINLIKTGVWQIQMKGVSVGSSTLLCEDGCLALVDTGASYISGSTSSIEKLMEALGAKKRLFDYVVKCNEGPTLPDISFHLGGKEYTLTSADYVFQESYSSKKLCTLAIHAMDIPPPTGPTWALGATFIRKFYTEFDRRNNRIGFALAR

SEQ ID NO: 1899 - DNA, 3261 bp, Homo sapiens
atgtcgcccggggccagccgcggtccccggggaagccaggcgccgctgatcgcgcccctctgctgcgccgcggccgcgctggggatgttgctgtggtcccccgcctgtcaggcgttcaacctggacgtggaaaagctcacagtgtacagcggccccaagggcagctacttcggctacgccgtggacttccacatacccgacgcccgcacagcgagtgtcttggtgggggcgcccaaagccaacaccagccagcccgatatcgtggaagggggagccgtctattactgtccttggcccgcggaggggtctgcgcagtgcaggcagataccgtttgacaccaccaacaacagaaagatcagagttaatggaaccaaagaacctatcgagttcaaatccaatcagtggtttggagcaacagtgaaagctcacaaaggaaaagttgtggcctgtgctcctttatatcactggagaactcttaaaccgacaccagaaaaggacccagttggcacctgctatgtagcaattcagaacttcagcgcctatgccgagttctctccttgccggaacagcaatgctgatccggaaggccagggttactgccaagcaggatttagtctggatttttataagaatggagaccttattgtgggaggacctgggagtttctactggcaaggacaagtgatcactgccagtgttgcagatatcattgcaaattactcattcaaggatatcctcaggaaactggcaggagaaaagcagacggaagtggctccagcttcctatgatgacagttaccttggatactcagttgctgctggggagtttactggggattctcagcaagaattggttgctggaattccaagaggagcacagaattttggatatgtttccatcattaactctacggatatgacgtttattcagaatttcacgggagaacagatggcatcttattttggatataccgttgtcgtatcagatgttaacagtgatggactggatgatgtcctggttggggcacctctctttatggaacgtgaatttgagagcaaccccagagaagtagggcaaatctacctgtatttgcaagtgagctctctcctcttcagagacccccagatcctcactggcaccgagacgtttgggagattcggtagtgctatggcacacttaggagacctgaaccaagatggatacaatgacattgccatcggagtgccttttgcaggcaaggatcaaagaggcaaagtgctcatttataatgggaacaaagatggcttaaacaccaagccttcccaagttctgcaaggagtgtgggcctcacatgctgtcccttccggatttggctttactttaagaggagattcagacatagacaagaatgattacccagatttgattgtgggtgcatttggaacaggaaaagtcgctgtttacagagcaagaccggttgtgactgtagatgcccagcttctgctgcacccaatgattatcaatcttgaaaataaaacttgccaggttccagactctatgacatctgctgcctgcttttctttaagagtatgtgcatctgtcacaggccagagcattgcaaacacaatagtcttgatggcagaggtgcaattagattccctgaaacagaaaggagctattaaacggacgctcttccttgataaccatcaggctcatcgcgtcttccctcttgtgataaaaaggcagaaatcccaccagtgccaggatttcatcgtttaccttcgagatgaaactgaattccgagataaattatctccaatcaacattagtttgaattacagtttggacgaatccacctttaaagaaggcctggaagtgaaaccaatattgaactactacagagaaaacattgttagtgaacaggctcacattctggtggactgtggagaagacaatctgtgtgttcctgacttgaagctgtcggctagaccagataagcatcaggtaatcattggagatgaaaatcaccttatgctcataataaatgcaagaaatgaaggggaaggagcatatgaagctgaactctttgtaatgataccagaagaggcagattatgttggaatcgaacgcaacaacaagggatttcgaccactgagctgtgagtacaagatggaaaatgtaaccaggatggtggtgtgtgaccttgggaaccctatggtgtctggaacaaattattccctgggcctccgatttgcagttccacgtcttgagaaaacaaacatgagcattaacttcgatctccaaatcagaagttccaacaaggacaatccagacagcaattttgtgagcctgcaaatcaacatcactgctgtagcgcaggtggaaataagaggagtgtcacaccctccgcagattgttctgcccattcataactgggaaccagaagaggagccccacaaagaggaggaggttggaccattggtggaacatatttatgagctgcacaatattggaccaagtaccatcagtgacaccatcctggaggtgggctggcctttctctgcccgggatgaatttcttctctatattttccatattcaaactctgggacctctgcagtgccaaccaaatcctaatatcaatccacaggatataaagcctgctgcctccccagaggacacccctgagctcagcgcctttttgcgaaactctactattcctcatcttgtcaggaagagggatgtacatgtggtcgaattccacagacagagccctgcaaaaatactgaattgtacaaatatcgagtgtttacaaatctcctgtgcagtgggacgactcgaaggaggagaaagcgcagtcctgaaagtcaggtcacgattatgggcccacaccttcctccagagaaaaaatgatccctatgctcttgcatccctggtgtcctttgaagttaagaagatgccttatacagatcagccagcaaaactcccagaaggaagcatagtaattaagacatcagttatttgggcaactccgaatgtttccttctcaatcccattatgggtaataatactagcaatacttcttggattgttggttctcgccattttaaccttagctttatggaagtgtggattctttgacagagccagacctcctcaggaggacatgaccgacagggaacagctgacaaatgacaagacccctgaggcatgacaagaaaaaaaaagaagaccaaagacctcaaacactggtcctgttcaaagaaaaagaaagaacatgagg

SEQ ID NO: 1900 - protein, 1063 aa, Homo sapiens
MSPGASRGPRGSQAPLIAPLCCAAAALGMLLWSPACQAFNLDVEKLTVYSGPKGSYFGYAVDFHIPDARTASVLVGAPKANTSQPDIVEGGAVYYCPWPAEGSAQCRQIPFDTTNNRKIRVNGTKEPIEFKSNQWFGATVKAHKGKVVACAPLYHWRTLKPTPEKDPVGTCYVAIQNFSAYAEFSPCRNSNADPEGQGYCQAGFSLDFYKNGDLIVGGPGSFYWQGQVITASVADIIANYSFKDILRKLAGEKQTEVAPASYDDSYLGYSVAAGEFTGDSQQELVAGIPRGAQNFGYVSIINSTDMTFIQNFTGEQMASYFGYTVVVSDVNSDGLDDVLVGAPLFMEREFESNPREVGQIYLYLQVSSLLFRDPQILTGTETFGRFGSAMAHLGDLNQDGYNDIAIGVPFAGKDQRGKVLIYNGNKDGLNTKPSQVLQGVWASHAVPSGFGFTLRGDSDIDKNDYPDLIVGAFGTGKVAVYRARPVVTVDAQLLLHPMIINLENKTCQVPDSMTSAACFSLRVCASVTGQSIANTIVLMAEVQLDSLKQKGAIKRTLFLDNHQAHRVFPLVIKRQKSHQCQDFIVYLRDETEFRDKLSPINISLNYSLDESTFKEGLEVKPILNYYRENIVSEQAHILVDCGEDNLCVPDLKLSARPDKHQVIIGDENHLMLIINARNEGEGAYEAELFVMIPEEADYVGIERNNKGFRPLSCEYKMENVTRMVVCDLGNPMVSGTNYSLGLRFAVPRLEKTNMSINFDLQIRSSNKDNPDSNFVSLQINITAVAQVEIRGVSHPPQIVLPIHNWEPEEEPHKEEEVGPLVEHIYELHNIGPSTISDTILEVGWPFSARDEFLLYIFHIQTLGPLQCQPNPNINPQDIKPAASPEDTPELSAFLRNSTIPHLVRKRDVHVVEFHRQSPAKILNCTNIECLQISCAVGRLEGGESAVLKVRSRLWAHTFLQRKNDPYALASLVSFEVKKMPYTDQPAKLPEGSIVIKTSVIWATPNVSFSIPLWVIILAILLGLLVLAILTLALWKCGFFDRARPPQEDMTDREQLTNDKTPEA

SEQ ID NO: 1901 - DNA, 5502 bp, Homo sapiens
aggcattgcctcgctgctttcttttctccaagacgggctgaggattgtacagctctaggcggagttggggctcttcggatcgcttagattctcctctttgctgcatttccccccacgtcctcgttctcccgcgtctgcctgcggacccggagaagggagaatggagagggggctgccgctcctctgcgccgtgctcgccctcgtcctcgccccggccggcgcttttcgcaacgataaatgtggcgatactataaaaattgaaagccccgggtaccttacatctcctggttatcctcattcttatcacccaagtgaaaaatgcgaatggctgattcaggctccggacccataccagagaattatgatcaacttcaaccctcacttcgatttggaggacagagactgcaagtatgactacgtggaagtcttcgatggagaaaatgaaaatggacattttaggggaaagttctgtggaaagatagcccctcctcctgttgtgtcttcagggccatttctttttatcaaatttgtctctgactacgaaacacatggtgcaggattttccatacgttatgaaattttcaagagaggtcctgaatgttcccagaactacacaacacctagtggagtgataaagtcccccggattccctgaaaaatatcccaacagccttgaatgcacttatattgtctttgtgccaaagatgtcagagattatcctggaatttgaaagctttgacctggagcctgactcaaatcctccaggggggatgttctgtcgctacgaccggctagaaatctgggatggattccctgatgttggccctcacattgggcgttactgtggacagaaaacaccaggtcgaatccgatcctcatcgggcattctctccatggttttttacaccgacagcgcgatagcaaaagaaggtttctcagcaaactacagtgtcttgcagagcagtgtctcagaagatttcaaatgtatggaagctctgggcatggaatcaggagaaattcattctgaccagatcacagcttcttcccagtatagcaccaactggtctgcagagcgctcccgcctgaactaccctgagaatgggtggactcccggagaggattcctaccgagagtggatacaggtagacttgggccttctgcgctttgtcacggctgtcgggacacagggcgccatttcaaaagaaaccaagaagaaatattatgtcaagacttacaagatcgacgttagctccaacggggaagactggatcaccataaaagaaggaaacaaacctgttctctttcagggaaacaccaaccccacagatgttgtggttgcagtattccccaaaccactgataactcgatttgtccgaatcaagcctgcaacttgggaaactggcatatctatgagatttgaagtatacggttgcaagataacagattatccttgctctggaatgttgggtatggtgtctggacttatttctgactcccagatcacatcatccaaccaaggggacagaaactggatgcctgaaaacatccgcctggtaaccagtcgctctggctgggcacttccacccgcacctcattcctacatcaatgagtggctccaaatagacctgggggaggagaagatcgtgaggggcatcatcattcagggtgggaagcaccgagagaacaaggtgttcatgaggaagttcaagatcgggtacagcaacaacggctcggactggaagatgatcatggatgacagcaaacgcaaggcgaagtcttttgagggcaacaacaactatgatacacctgagctgcggacttttccagctctctccacgcgattcatcaggatctaccccgagagagccactcatggcggactggggctcagaatggagctgctgggctgtgaagtggaagcccctacagctggaccgaccactcccaacgggaacttggtggatgaatgtgatgacgaccaggccaactgccacagtggaacaggtgatgacttccagctcacaggtggcaccactgtgctggccacagaaaagcccacggtcatagacagcaccatacaatcagagtttccaacatatggttttaactgtgaatttggctggggctctcacaagaccttctgccactgggaacatgacaatcacgtgcagctcaagtggagtgtgttgaccagcaagacgggacccattcaggatcacacaggagatggcaacttcatctattcccaagctgacgaaaatcagaagggcaaagtggctcgcctggtgagccctgtggtttattcccagaactctgcccactgcatgaccttctggtatcacatgtctgggtcccacgtcggcacactcagggtcaaactgcgctaccagaagccagaggagtacgatcagctggtctggatggccattggacaccaaggtgaccactggaaggaagggcgtgtcttgctccacaagtctctgaaactttatcaggtgattttcgagggcgaaatcggaaaaggaaaccttggtgggattgctgtggatgacattagtattaataaccacatttcacaagaagattgtgcaaaaccagcagacctggataaaaagaacccagaaattaaaattgatgaaacagggagcacgccaggatacgaaggtgaaggagaaggtgacaagaacatctccaggaagccaggcaatgtgttgaagaccttagaccccatcctcatcaccatcatagccatgagtgccctgggggtcctcctgggggctgtctgtggggtcgtgctgtactgtgcctgttggcataatgggatgtcagaaagaaacttgtctgccctggagaactataactttgaacttgtggatggtgtgaagttgaaaaaagacaaactgaatacacagagtacttattcggaggcatgaaggcagacagagatgaaaagacagtcaaaggacggaagtggaaggacgggagtgagctggggagctgttgatctttcactatacaggctgggaagtgtgttgatgaccactgagccaggcttttctcaggagcttcaatgagtatggccgacagacatggacaaggagctgtgttcaccatcggactcatgtgcagtcagcttttttcctgttggtttcatttgaataatcagatgctggtgttgagaccaagtatgattgacataatcattcatttcgacccctcctgcccctctctctctctctcctctcccctttgtggattctttttggaaactgagcgaaatccaagatgctggcaccaagcgtattccgtgtggccctttggatggacatgctacctgaaacccagtgcccagaatatactagaatcaccgcatttcagtggactcctgaagttgtacttgtgtataattgcccgcgtcgtgcataggcaaagaaggattaggctgttttctttttaaagtactgtagcctcagtactggtgtagtgtgtcagctctgtttacgaagcaatactgtccagttttcttgctgtttttccggtgttgtactaaacctcgtgcttgtgaactccatacagaaaacggtgccatccctgaacacggctggccactgggtatactgctgacaaccgcaacaacaaaaacacaaatccttggcactggctagtctatgtcctctcaagtgcctttttgtttgtactggttcattgtgttacattaacgacccactctgcttcttgctggtgaaagccctgctctttaatcaaactctggtggcccactgactaagaagaaagtttattttcgtgtgagatgccagcccctccgggcaggcaagggctctgaagatttggcaacgtggcttaattgttctgctttttctgtagttcaatttcatgtttcttgacccttttgtataaagctacaatattctctcttattgttctttcatatggaatgtattttcaaatgtaaactctcttctctttctctctcctatctctctgtcttttttctctcttagaattggaggatttgccattgtccaggaaagaaacttgcagctttaacctgctgggaatggcaaacgattttactagactttatgtttaaaaataaataaataagggaaattcctaactttgccctccaaagtctaactttggttttcttgttaactggttaaagtgacagtatcttttttccttatctattctattcaaaatgacctttgatagaaatgttggcatttagtagaaatagtgataagttgaggaaagaaataatacaaattggctttcaagtgagacccaaaggaagaactggataaaatcttccaaatccaaaagcatgagatttttctatccaaatatgcaaaaatgacccaagagaactttcttattttgctactgagtcacacaagggaagtggaaggaagaacagttaatttaagaatgaaactataaatcctgatgcctgggggtcaagtattttaagataagagggggaaaaacacataaagtcaaacaaatgttttaaaaattcataacagcaaccttgaaaaaatagacttaaatgaatgcttctagaaacttccagcggctcacaaagaataagcctgccttagggctggcaacatctaagcctctaacagcacagggaagcaaatatcttaccaggcagcctatgaattaacccaaagaagctttggttggttttggtggatttttatcatgccatgttggacatgagattttttagatcttccttcccacattgctagacgtctcactcaaagacatttgttgggagtcacatttgcatcatagacgagacagtccattcatcttagttaaattggattgagaatgccttttgtttccaggaaaatattgatcaccatgaaagaagaatagttttttgtccccagagacattcatttagttgatataatcctaccagaaggaaagcactaagaaacactcgtttgttgtttttaaaggcaacagacttaaagttgtcctcagccaaggaaaaatgatactgcaactttaaaatttaaagtatcttgcactgataaatatatttaaaaattatatgtttataaagttattaatttgtaaaggcagtgttacaaaatgttcagtttatattgttttagattgttttgtaatttttaaaggtgtaaaataacatattttttctttatggaaatctataaaactttctgtagtaaaatgttttcattttactggtatattattgcttcatgttttgtaccatcataagattttgtgcagattttttttacagaaattattattttctatgacaatatgacacttgtaaattgttgtttcaaaatgaacagcgaagccttaactttaaatgacatttgtattctcagacactgagtagcataaaaaccacatagaactgaactgtaacttaaattccaaactatgactactacattccaaagaaacagttgaattaaacattttc

SEQ ID NO: 1902 - protein, 923 aa, Homo sapiens
MERGLPLLCAVLALVLAPAGAFRNDKCGDTIKIESPGYLTSPGYPHSYHPSEKCEWLIQAPDPYQRIMINFNPHFDLEDRDCKYDYVEVFDGENENGHFRGKFCGKIAPPPVVSSGPFLFIKFVSDYETHGAGFSIRYEIFKRGPECSQNYTTPSGVIKSPGFPEKYPNSLECTYIVFVPKMSEIILEFESFDLEPDSNPPGGMFCRYDRLEIWDGFPDVGPHIGRYCGQKTPGRIRSSSGILSMVFYTDSAIAKEGFSANYSVLQSSVSEDFKCMEALGMESGEIHSDQITASSQYSTNWSAERSRLNYPENGWTPGEDSYREWIQVDLGLLRFVTAVGTQGAISKETKKKYYVKTYKIDVSSNGEDWITIKEGNKPVLFQGNTNPTDVVVAVFPKPLITRFVRIKPATWETGISMRFEVYGCKITDYPCSGMLGMVSGLISDSQITSSNQGDRNWMPENIRLVTSRSGWALPPAPHSYINEWLQIDLGEEKIVRGIIIQGGKHRENKVFMRKFKIGYSNNGSDWKMIMDDSKRKAKSFEGNNNYDTPELRTFPALSTRFIRIYPERATHGGLGLRMELLGCEVEAPTAGPTTPNGNLVDECDDDQANCHSGTGDDFQLTGGTTVLATEKPTVIDSTIQSEFPTYGFNCEFGWGSHKTFCHWEHDNHVQLKWSVLTSKTGPIQDHTGDGNFIYSQADENQKGKVARLVSPVVYSQNSAHCMTFWYHMSGSHVGTLRVKLRYQKPEEYDQLVWMAIGHQGDHWKEGRVLLHKSLKLYQVIFEGEIGKGNLGGIAVDDISINNHISQEDCAKPADLDKKNPEIKIDETGSTPGYEGEGEGDKNISRKPGNVLKTLDPILITIIAMSALGVLLGAVCGVVLYCACWHNGMSERNLSALENYNFELVDGVKLKKDKLNTQSTYSEA

SEQ ID NO: 1903 - DNA, 1987 bp, Homo sapiens
cttttctccaagacgggctgaggattgtacagctctaggcggagttggggctcttcggatcgcttagattctcctctttgctgcatttccccccacgtcctcgttctcccgcgtctgcctgcggacccggagaagggagaatggagagggggctgccgctcctctgcgccgtgctcgccctcgtcctcgccccggccggcgcttttcgcaacgataaatgtggcgatactataaaaattgaaagccccgggtaccttacatctcctggttatcctcattcttatcacccaagtgaaaaatgcgaatggctgattcaggctccggacccataccagagaattatgatcaacttcaaccctcacttcgatttggaggacagagactgcaagtatgactacgtggaagtcttcgatggagaaaatgaaaatggacattttaggggaaagttctgtggaaagatagcccctcctcctgttgtgtcttcagggccatttctttttatcaaatttgtctctgactacgaaacacatggtgcaggattttccatacgttatgaaattttcaagagaggtcctgaatgttcccagaactacacaacacctagtggagtgataaagtcccccggattccctgaaaaatatcccaacagccttgaatgcacttatattgtctttgtgccaaagatgtcagagattatcctggaatttgaaagctttgacctggagcctgactcaaatcctccaggggggatgttctgtcgctacgaccggctagaaatctgggatggattccctgatgttggccctcacattgggcgttactgtggacagaaaacaccaggtcgaatccgatcctcatcgggcattctctccatggttttttacaccgacagcgcgatagcaaaagaaggtttctcagcaaactacagtgtcttgcagagcagtgtctcagaagatttcaaatgtatggaagctctgggcatggaatcaggagaaattcattctgaccagatcacagcttcttcccagtatagcaccaactggtctgcagagcgctcccgcctgaactaccctgagaatgggtggactcccggagaggattcctaccgagagtggatacaggtagacttgggccttctgcgctttgtcacggctgtcgggacacagggcgccatttcaaaagaaaccaagaagaaatattatgtcaagacttacaagatcgacgttagctccaacggggaagactggatcaccataaaagaaggaaacaaacctgttctctttcagggaaacaccaaccccacagatgttgtggttgcagtattccccaaaccactgataactcgatttgtccgaatcaagcctgcaacttgggaaactggcatatctatgagatttgaagtatacggttgcaagataacagattatccttgctctggaatgttgggtatggtgtctggacttatttctgactcccagatcacatcatccaaccaaggggacagaaactggatgcctgaaaacatccgcctggtaaccagtcgctctggctgggcacttccacccgcacctcattcctacatcaatgagtggctccaaatagacctgggggaggagaagatcgtgaggggcatcatcattcagggtgggaagcaccgagagaacaaggtgttcatgaggaagttcaagatcgggtacagcaacaacggctcggactggaagatgatcatggatgacagcaaacgcaaggcgaagtcttttgagggcaacaacaactatgatacacctgagctgcggacttttccagctctctccacgcgattcatcaggatctaccccgagagagccactcatggcggactggggctcagaatggagctgctgggctgtgaagtggaaggtggcaccactgtgctggccacagaaaagcccacggtcatagacagcaccatacaatcaggtatcaaataaaatacgaaatgtgacag

SEQ ID NO: 1904 - protein, 609 aa, Homo sapiens
MERGLPLLCAVLALVLAPAGAFRNDKCGDTIKIESPGYLTSPGYPHSYHPSEKCEWLIQAPDPYQRIMINFNPHFDLEDRDCKYDYVEVFDGENENGHFRGKFCGKIAPPPVVSSGPFLFIKFVSDYETHGAGFSIRYEIFKRGPECSQNYTTPSGVIKSPGFPEKYPNSLECTYIVFVPKMSEIILEFESFDLEPDSNPPGGMFCRYDRLEIWDGFPDVGPHIGRYCGQKTPGRIRSSSGILSMVFYTDSAIAKEGFSANYSVLQSSVSEDFKCMEALGMESGEIHSDQITASSQYSTNWSAERSRLNYPENGWTPGEDSYREWIQVDLGLLRFVTAVGTQGAISKETKKKYYVKTYKIDVSSNGEDWITIKEGNKPVLFQGNTNPTDVVVAVFPKPLITRFVRIKPATWETGISMRFEVYGCKITDYPCSGMLGMVSGLISDSQITSSNQGDRNWMPENIRLVTSRSGWALPPAPHSYINEWLQIDLGEEKIVRGIIIQGGKHRENKVFMRKFKIGYSNNGSDWKMIMDDSKRKAKSFEGNNNYDTPELRTFPALSTRFIRIYPERATHGGLGLRMELLGCEVEGGTTVLATEKPTVIDSTIQSGIK

SEQ ID NO: 1905 - DNA, 1991 bp, Homo sapiens
atgcagatcccgcgcgccgctcttctcccgctgctgctgctgctgctggcggcgcccgcctcggcgcagctgtcccgggccggccgctcggcgcctttggccgccgggtgcccagaccgctgcgagccggcgcgctgcccgccgcagccggagcactgcgagggcggccgggcccgggacgcgtgcggctgctgcgaggtgtgcggcgcgcccgagggcgccgcgtgcggcctgcaggagggcccgtgcggcgaggggctgcagtgcgtggtgcccttcggggtgccagcctcggccacggtgcggcggcgcgcgcaggccggcctctgtgtgtgcgccagcagcgagccggtgtgcggcagcgacgccaacacctacgccaacctgtgccagctgcgcgccgccagccgccgctccgagaggctgcaccggccgccggtcatcgtcctgcagcgcggagcctgcggccaagggcaggaagatcccaacagtttgcgccataaatataactttatcgcggacgtggtggagaagatcgcccctgccgtggttcatatcgaattgtttcgcaagcttccgttttctaaacgagaggtgccggtggctagtgggtctgggtttattgtgtcggaagatggactgatcgtgacaaatgcccacgtggtgaccaacaagcaccgggtcaaagttgagctgaagaacggtgccacttacgaagccaaaatcaaggatgtggatgagaaagcagacatcgcactcatcaaaattgaccaccagggcaagctgcctgtcctgctgcttggccgctcctcagagctgcggccgggagagttcgtggtcgccatcggaagcccgttttcccttcaaaacacagtcaccaccgggatcgtgagcaccacccagcgaggcggcaaagagctggggctccgcaactcagacatggactacatccagaccgacgccatcatcaactatggaaactcgggaggcccgttagtaaacctggacggtgaagtgattggaattaacactttgaaagtgacagctggaatctcctttgcaatcccatctgataagattaaaaagttcctcacggagtcccatgaccgacaggccaaaggaaaagccatcaccaagaagaagtatattggtatccgaatgatgtcactcacgtccagcaaagccaaagagctgaaggaccggcaccgggacttcccagacgtgatctcaggagcgtatataattgaagtaattcctgataccccagcagaagctggtggtctcaaggaaaacgacgtcataatcagcatcaatggacagtccgtggtctccgccaatgatgtcagcgacgtcattaaaagggaaagcaccctgaacatggtggtccgcaggggtaatgaagatatcatgatcacagtgattcccgaagaaattgacccataggcagaggcatgagctggacttcatgtttccctcaaagactctcccgtggatgacggatgaggactctgggctgctggaataggacactcaagacttttgactgccattttgtttgttcagtggagactccctggccaacagaatccttcttgatagtttgcaggcaaaacaaatgtaatgttgcagatccgcaggcagaagctctgcccttctgtatcctatgtatgcagtgtgctttttcttgccagcttgggccattcttgcttagacagtcagcatttgtctcctcctttaactgagtcatcatcttagtccaactaatgcagtcgatacaatgcgtagatagaagaagccccacgggagccaggatgggactggtcgtgtttgtgcttttctccaagtcagcacccaaaggtcaatgcacagagaccccgggtgggtgagcgctggcttctcaaacggccgaagttgcctcttttaggaatctctttggaattgggagcacgatgactctgagtttgagctattaaagtacttcttacacattg

SEQ ID NO: 1906 - protein, 480 aa, Homo sapiens
MQIPRAALLPLLLLLLAAPASAQLSRAGRSAPLAAGCPDRCEPARCPPQPEHCEGGRARDACGCCEVCGAPEGAACGLQEGPCGEGLQCVVPFGVPASATVRRRAQAGLCVCASSEPVCGSDANTYANLCQLRAASRRSERLHRPPVIVLQRGACGQGQEDPNSLRHKYNFIADVVEKIAPAVVHIELFRKLPFSKREVPVASGSGFIVSEDGLIVTNAHVVTNKHRVKVELKNGATYEAKIKDVDEKADIALIKIDHQGKLPVLLLGRSSELRPGEFVVAIGSPFSLQNTVTTGIVSTTQRGGKELGLRNSDMDYIQTDAIINYGNSGGPLVNLDGEVIGINTLKVTAGISFAIPSDKIKKFLTESHDRQAKGKAITKKKYIGIRMMSLTSSKAKELKDRHRDFPDVISGAYIIEVIPDTPAEAGGLKENDVIISINGQSVVSANDVSDVIKRESTLNMVVRRGNEDIMITVIPEEIDP

SEQ ID NO: 1907 - DNA, 1563 bp, Homo sapiens
aggccaagtgcgctgtgctcgaggggtgccggccaggcctgagcgagcgagctagccagcaggcatcgagggggcgcggctgccgtccggacgagacaggcgaacccgacgcagaagagtccaccaccggacagccaggtagccgccgcgtccctcgcacacgcagagtcgggcggcgcggggtctcccttgcgcccggcctccgccctctcctcctctcctttccccttcttctcgctgtcctctcctctctcgctgcccgcgtttgcgcagccccgggccatgtccgacgcgtccctccgcagcacatccacgatggagcgtcttgtcgcccgtgggaccttcccagtactagtgcgcaccagcgcctgccgcagcctcttcgggccggtggaccacgaggagctgagccgcgagctgcaggcccgcctggccgagctgaacgccgaggaccagaaccgctgggattacgacttccagcaggacatgccgctgcggggccctggacgcctgcagtggaccgaagtggacagcgactcggtgcccgcgttctaccgcgagacggtgcaggtggggcgctgccgcctgctgctggcgccgcggcccgtcgcggtcgcggtggctgtcagcccgcccctcgagccggccgctgagtccctcgacggcctcgaggaggcgccggagcagctgcctagtgtcccggtcccggccccggcgtccaccccgcccccagtcccggtcctggctccagccccggccccggctccggctccggtcgcggctccggtcgcggctccggtcgcggtcgcggtcctggccccggccccggccccggctccggctccggctccggccccggctccagtcgcggccccggccccagccccggccccggccccggccccggcccccgccccggccccggccccggacgcggcgcctcaagagagcgccgagcagggcgcgaaccaggggcagcgcggccaggagcctctcgctgaccagctgcactcggggatttcgggacgtcccgcggccggcaccgcggccgccagcgccaacggcgcggcgatcaagaagctgtccgggcctctgatctccgatttcttcgccaagcgcaagagatcagcgcctgagaagtcgtcgggcgatgtccccgcgccgtgtccctctccaagcgccgcccctggcgtgggctcggtggagcagaccccgcgcaagaggctgcggtgagccaaagcccaaagagccccgagggaacctgccggggcagcggacgttggaagggcgctgggcctcggctgggaccgttcatgtagcagcaaccggcggcggctgccgcagagcagcgttcggttttgtttttaaattttgaaaactgtgcaatgtattaataacgtctttttatatctaaatgtattctgcacgagaaggtacactggtcccaaggtgtaaagctttaagagtcatttatataaaatgtttaatctctgctgaaactcagtgcaaaaaaaagaaaaaagaaaaaaaaaaggaaaaaataaaaaaaccatgtatatttgt

SEQ ID NO: 1908 - protein, 316 aa, Homo sapiens
MSDASLRSTSTMERLVARGTFPVLVRTSACRSLFGPVDHEELSRELQARLAELNAEDQNRWDYDFQQDMPLRGPGRLQWTEVDSDSVPAFYRETVQVGRCRLLLAPRPVAVAVAVSPPLEPAAESLDGLEEAPEQLPSVPVPAPASTPPPVPVLAPAPAPAPAPVAAPVAAPVAVAVLAPAPAPAPAPAPAPAPVAAPAPAPAPAPAPAPAPAPAPDAAPQESAEQGANQGQRGQEPLADQLHSGISGRPAAGTAAASANGAAIKKLSGPLISDFFAKRKRSAPEKSSGDVPAPCPSPSAAPGVGSVEQTPRKRLR

SEQ ID NO: 1909 - DNA, 2969 bp, Homo sapiens
ggggtaaggagttcaaggcagcgcccacacccgggggctctccgcaacccgaccgcctgtccgctcccccacttcccgccctccctcccacctactcattcacccacccacccacccagagccgggacggcagcccaggcgcccgggccccgccgtctcctcgccgcgatcctggacttcctcttgctgcaggacccggcttccacgtgtgtcccggagccggcgtctcagcacacgctccgctccgggcctgggtgcctacagcagccagagcagcagggagtccgggacccgggcggcatctgggccaagttaggcgccgccgaggccagcgctgaacgtctccagggccggaggagccgcggggcgtccgggtctgagccgcagcaaatgggctccgacgtgcgggacctgaacgcgctgctgcccgccgtcccctccctgggtggcggcggcggctgtgccctgcctgtgagcggcgcggcgcagtgggcgccggtgctggactttgcgcccccgggcgcttcggcttacgggtcgttgggcggccccgcgccgccaccggctccgccgccacccccgccgccgccgcctcactccttcatcaaacaggagccgagctggggcggcgcggagccgcacgaggagcagtgcctgagcgccttcactgtccacttttccggccagttcactggcacagccggagcctgtcgctacgggcccttcggtcctcctccgcccagccaggcgtcatccggccaggccaggatgtttcctaacgcgccctacctgcccagctgcctcgagagccagcccgctattcgcaatcagggttacagcacggtcaccttcgacgggacgcccagctacggtcacacgccctcgcaccatgcggcgcagttccccaaccactcattcaagcatgaggatcccatgggccagcagggctcgctgggtgagcagcagtactcggtgccgcccccggtctatggctgccacacccccaccgacagctgcaccggcagccaggctttgctgctgaggacgccctacagcagtgacaatttataccaaatgacatcccagcttgaatgcatgacctggaatcagatgaacttaggagccaccttaaagggccacagcacagggtacgagagcgataaccacacaacgcccatcctctgcggagcccaatacagaatacacacgcacggtgtcttcagaggcattcaggatgtgcgacgtgtgcctggagtagccccgactcttgtacggtcggcatctgagaccagtgagaaacgccccttcatgtgtgcttacccaggctgcaataagagatattttaagctgtcccacttacagatgcacagcaggaagcacactggtgagaaaccataccagtgtgacttcaaggactgtgaacgaaggttttctcgttcagaccagctcaaaagacaccaaaggagacatacaggtgtgaaaccattccagtgtaaaacttgtcagcgaaagttctcccggtccgaccacctgaagacccacaccaggactcatacaggtaaaacaagtgaaaagcccttcagctgtcggtggccaagttgtcagaaaaagtttgcccggtcagatgaattagtccgccatcacaacatgcatcagagaaacatgaccaaactccagctggcgctttgaggggtctccctcggggaccgttcagtgtcccaggcagcacagtgtgtgaactgctttcaagtctgactctccactcctcctcactaaaaaggaaacttcagttgatcttcttcatccaacttccaagacaagataccggtgcttctggaaactaccaggtgtgcctggaagagttggtctctgccctgcctacttttagttgactcacaggccctggagaagcagctaacaatgtctggttagttaaaagcccattgccatttggtgtggattttctactgtaagaagagccatagctgatcatgtccccctgacccttcccttctttttttatgctcgttttcgctggggatggaattattgtaccattttctatcatggaatatttataggccagggcatgtgtatgtgtctgctaatgtaaactttgtcatggtttccatttactaacagcaacagcaagaaataaatcagagagcaaggcatcgggggtgaatcttgtctaacattcccgaggtcagccaggctgctaacctggaaagcaggatgtagttctgccaggcaacttttaaagctcatgcatttcaagcagctgaagaaaaaatcagaactaaccagtacctctgtatagaaatctaaaagaattttaccattcagttaattcaatgtgaacactggcacactgctcttaagaaactatgaagatctgagatttttttgtgtatgtttttgactcttttgagtggtaatcatatgtgtctttatagatgtacatacctccttgcacaaatggaggggaattcattttcatcactgggagtgtccttagtgtataaaaaccatgctggtatatggcttcaagttgtaaaaatgaaagtgactttaaaagaaaataggggatggtccaggatctccactgataagactgtttttaagtaacttaaggacctttgggtctacaagtatatgtgaaaaaaatgagacttactgggtgaggaaatccattgtttaaagatggtcgtgtgtgtgtgtgtgtgtgtgtgtgtgtgtgtgttgtgttgtgttttgttttttaagggagggaatttattatttaccgttgcttgaaattactgtgtaaatatatgtctgataatgatttgctctttgacaactaaaattaggactgtataagtactagatgcatcactgggtgttgatcttacaagatattgatgataacacttaaaattgtaacctgcatttttcactttgctctcaattaaagtctattcaaaagg

SEQ ID NO: 1910 - protein, 432 aa, Homo sapiens
MGSDVRDLNALLPAVPSLGGGGGCALPVSGAAQWAPVLDFAPPGASAYGSLGGPAPPPAPPPPPPPPPHSFIKQEPSWGGAEPHEEQCLSAFTVHFSGQFTGTAGACRYGPFGPPPPSQASSGQARMFPNAPYLPSCLESQPAIRNQGYSTVTFDGTPSYGHTPSHHAAQFPNHSFKHEDPMGQQGSLGEQQYSVPPPVYGCHTPTDSCTGSQALLLRTPYSSDNLYQMTSQLECMTWNQMNLGATLKGHSTGYESDNHTTPILCGAQYRIHTHGVFRGIQDVRRVPGVAPTLVRSASETSEKRPFMCAYPGCNKRYFKLSHLQMHSRKHTGEKPYQCDFKDCERRFSRSDQLKRHQRRHTGVKPFQCKTCQRKFSRSDHLKTHTRTHTGKTSEKPFSCRWPSCQKKFARSDELVRHHNMHQRNMTKLQLAL

SEQ ID NO: 1911 - DNA, 3020 bp, Homo sapiens
ggggtaaggagttcaaggcagcgcccacacccgggggctctccgcaacccgaccgcctgtccgctcccccacttcccgccctccctcccacctactcattcacccacccacccacccagagccgggacggcagcccaggcgcccgggccccgccgtctcctcgccgcgatcctggacttcctcttgctgcaggacccggcttccacgtgtgtcccggagccggcgtctcagcacacgctccgctccgggcctgggtgcctacagcagccagagcagcagggagtccgggacccgggcggcatctgggccaagttaggcgccgccgaggccagcgctgaacgtctccagggccggaggagccgcggggcgtccgggtctgagccgcagcaaatgggctccgacgtgcgggacctgaacgcgctgctgcccgccgtcccctccctgggtggcggcggcggctgtgccctgcctgtgagcggcgcggcgcagtgggcgccggtgctggactttgcgcccccgggcgcttcggcttacgggtcgttgggcggccccgcgccgccaccggctccgccgccacccccgccgccgccgcctcactccttcatcaaacaggagccgagctggggcggcgcggagccgcacgaggagcagtgcctgagcgccttcactgtccacttttccggccagttcactggcacagccggagcctgtcgctacgggcccttcggtcctcctccgcccagccaggcgtcatccggccaggccaggatgtttcctaacgcgccctacctgcccagctgcctcgagagccagcccgctattcgcaatcagggttacagcacggtcaccttcgacgggacgcccagctacggtcacacgccctcgcaccatgcggcgcagttccccaaccactcattcaagcatgaggatcccatgggccagcagggctcgctgggtgagcagcagtactcggtgccgcccccggtctatggctgccacacccccaccgacagctgcaccggcagccaggctttgctgctgaggacgccctacagcagtgacaatttataccaaatgacatcccagcttgaatgcatgacctggaatcagatgaacttaggagccaccttaaagggagttgctgctgggagctccagctcagtgaaatggacagaagggcagagcaaccacagcacagggtacgagagcgataaccacacaacgcccatcctctgcggagcccaatacagaatacacacgcacggtgtcttcagaggcattcaggatgtgcgacgtgtgcctggagtagccccgactcttgtacggtcggcatctgagaccagtgagaaacgccccttcatgtgtgcttacccaggctgcaataagagatattttaagctgtcccacttacagatgcacagcaggaagcacactggtgagaaaccataccagtgtgacttcaaggactgtgaacgaaggttttctcgttcagaccagctcaaaagacaccaaaggagacatacaggtgtgaaaccattccagtgtaaaacttgtcagcgaaagttctcccggtccgaccacctgaagacccacaccaggactcatacaggtaaaacaagtgaaaagcccttcagctgtcggtggccaagttgtcagaaaaagtttgcccggtcagatgaattagtccgccatcacaacatgcatcagagaaacatgaccaaactccagctggcgctttgaggggtctccctcggggaccgttcagtgtcccaggcagcacagtgtgtgaactgctttcaagtctgactctccactcctcctcactaaaaaggaaacttcagttgatcttcttcatccaacttccaagacaagataccggtgcttctggaaactaccaggtgtgcctggaagagttggtctctgccctgcctacttttagttgactcacaggccctggagaagcagctaacaatgtctggttagttaaaagcccattgccatttggtgtggattttctactgtaagaagagccatagctgatcatgtccccctgacccttcccttctttttttatgctcgttttcgctggggatggaattattgtaccattttctatcatggaatatttataggccagggcatgtgtatgtgtctgctaatgtaaactttgtcatggtttccatttactaacagcaacagcaagaaataaatcagagagcaaggcatcgggggtgaatcttgtctaacattcccgaggtcagccaggctgctaacctggaaagcaggatgtagttctgccaggcaacttttaaagctcatgcatttcaagcagctgaagaaaaaatcagaactaaccagtacctctgtatagaaatctaaaagaattttaccattcagttaattcaatgtgaacactggcacactgctcttaagaaactatgaagatctgagatttttttgtgtatgtttttgactcttttgagtggtaatcatatgtgtctttatagatgtacatacctccttgcacaaatggaggggaattcattttcatcactgggagtgtccttagtgtataaaaaccatgctggtatatggcttcaagttgtaaaaatgaaagtgactttaaaagaaaataggggatggtccaggatctccactgataagactgtttttaagtaacttaaggacctttgggtctacaagtatatgtgaaaaaaatgagacttactgggtgaggaaatccattgtttaaagatggtcgtgtgtgtgtgtgtgtgtgtgtgtgtgtgtgtgttgtgttgtgttttgttttttaagggagggaatttattatttaccgttgcttgaaattactgtgtaaatatatgtctgataatgatttgctctttgacaactaaaattaggactgtataagtactagatgcatcactgggtgttgatcttacaagatattgatgataacacttaaaattgtaacctgcatttttcactttgctctcaattaaagtctattcaaaagg

SEQ ID NO: 1912 - protein, 449 aa, Homo sapiens
MGSDVRDLNALLPAVPSLGGGGGCALPVSGAAQWAPVLDFAPPGASAYGSLGGPAPPPAPPPPPPPPPHSFIKQEPSWGGAEPHEEQCLSAFTVHFSGQFTGTAGACRYGPFGPPPPSQASSGQARMFPNAPYLPSCLESQPAIRNQGYSTVTFDGTPSYGHTPSHHAAQFPNHSFKHEDPMGQQGSLGEQQYSVPPPVYGCHTPTDSCTGSQALLLRTPYSSDNLYQMTSQLECMTWNQMNLGATLKGVAAGSSSSVKWTEGQSNHSTGYESDNHTTPILCGAQYRIHTHGVFRGIQDVRRVPGVAPTLVRSASETSEKRPFMCAYPGCNKRYFKLSHLQMHSRKHTGEKPYQCDFKDCERRFSRSDQLKRHQRRHTGVKPFQCKTCQRKFSRSDHLKTHTRTHTGKTSEKPFSCRWPSCQKKFARSDELVRHHNMHQRNMTKLQLAL

SEQ ID NO: 1913 - DNA, 5153 bp, Homo sapiens
gggcgcagaggaggaaagggagcaggcgcagggggactggaaaggcagcatgcgctcgccaggagcaacctcggcgcccagggtctgaggctgcagccccagttcgccattgtgagccgccgccgggggagtccgctagcgcagccgtgcccccgagtccccgtccgcgcagcgatggggcacctgcccacggggatacacggcgcccgccgcctcctgcctctgctctggctctttgtgctgttcaagaatgctacagctttccatgtaactgtccaagatgataataacatcgttgtctcattagaagcttcagacgtcatcagtccagcatctgtgtatgttgtgaagataactggtgaatccaaaaattatttcttcgaatttgaggaattcaacagcactttgcctcctcctgttattttcaaggccagttatcatggcctttattatataatcactctggtagtggtaaatggaaatgtggtgaccaagccatccagatcaatcactgtgttaacaaaacctctacctgtaaccagtgtttccatatatgactataaaccttctcctgaaacaggagtcctgtttgaaatacattatccagaaaaatataacgttttcacaagagtgaacattagctactgggaaggtaaagacttccggacaatgctatataaagatttctttaagggaaaaacagtatttaatcactggctgccaggaatgtgttatagtaatatcacctttcagctggtatctgaggcaacttttaataaaagtacccttgttgagtacagtggtgtcagtcacgaacccaaacagcacagaactgccccttatccacctcaaaatatttccgttcgtatcgtaaacttgaacaaaaacaactgggaagaacagagtggcaatttcccagaagaatccttcatgagatcacaagatacaataggaaaagaaaaactcttccattttacagaagaaacccctgaaattccctcgggcaacatttcttccggttggcctgattttaatagcagtgactatgaaactacgtctcagccatattggtgggacagtgcatctgcagctcctgaaagtgaagatgaatttgtcagcgtacttcccatggaatacgaaaataacagtacactcagtgagacagagaagtcaacatcaggctctttctcctttttccctgtgcaaatgatattgacctggttaccacccaaaccacccactgcttttgatgggttccatatccatattgaacgagaagagaactttactgaatatttgatggtggatgaagaagcacatgaatttgttgcagaactgaaggaacctgggaaatataagttatctgtgacaacctttagttcctcaggatcttgtgaaactcgaaaaagtcagtcagcaaaatcactcagcttttatatcagtccttcaggagagtggattgaagaactgaccgagaagccgcagcacgtgagtgtccacgttttaagctcaaccactgccttgatgtcctggacatcttcccaagagaactacaacagcaccattgtgtctgtggtgtcgctgacctgccagaaacaaaaggagagccagaggcttgaaaagcagtactgcactcaggtgaactcaagcaaacctattattgaaaatctggttcctggtgcccagtaccaggttgtaatatacctaaggaaaggccctttgattggaccaccttcagatcctgtgacatttgctattgttcccacaggaataaaggatttaatgctctatcctttgggtcctacggccgtggttctgagctggaccagaccttatttaggcgtgttcagaaaatacgtggttgaaatgttttatttcaaccctgctacaatgacatcagagtggaccacctactatgaaatagcagcaactgtttccttaactgcatccgtgagaatagctaatctgctgccagcatggtactacaacttccgggttaccatggtgacgtggggagatccagaattgagctgctgtgacagctctaccatcagcttcataacagccccagtggctccggaaatcacttctgtggaatatttcaacagtctgttatatatcagttggacatatggggatgatacaacggacttgtcccattctagaatgcttcactggatggtggttgcagaaggaaaaaagaaaattaaaaagagtgtaacacgcaatgtcatgactgcaattctcagcttgcctccaggcgacatctataacctctcagtaactgcttgtactgaaagaggaagtaatacctccatgctccgccttgtcaagctagaaccagctccacccaaatcactcttcgcagtgaacaaaacccagacttcagtgactttgctgtgggtggaagagggagtagctgatttctttgaagttttctgtcaacaagttggctccagtcagaaaaccaaacttcaggaaccagttgctgtttcttcccatgtcgtgaccatctccagccttcttcctgccactgcctacaattgtagtgtcaccagctttagccatgacagccccagtgtccctacgttcatagccgtctcaacaatggttacagagatgaatcccaatgtggtagtgatctccgtgctggccatccttagcacacttttaattggactgttgcttgttaccctcattattcttaggaaaaagcatctgcagatggctagggagtgtggagctggtacatttgtcaattttgcatccttagagagggatggaaagcttccatacaactggcgtaggagtatatttgctttcttaaccctgctaccctcatgtctttggactgattatcttttggcattttatattaatccttggagtaaaaatggtttaaagaagaggaaactgacaaacccggttcaactggatgactttgatgcctatattaaggatatggccaaagactctgactataaattttctcttcagtttgaggagttgaaattgattggactggatatcccacactttgctgcagatcttccactgaatcgatgtaaaaaccgttacacaaacatcctaccatatgacttcagccgtgtgagattagtctccatgaatgaagaggaaggtgcagactacatcaatgccaactatattcctggatacaactcaccccaggagtatattgccacccaggggccactgcctgaaaccagaaatgacttctggaagatggtcctgcaacaaaagtctcagattattgtcatgctcactcagtgtaatgagaaaaggagggtgaaatgtgaccattactggccattcacggaagaacctatagcctatggagacatcactgtggagatgatttcagaggaagagcaggacgactgggcctgtagacacttccggatcaactatgctgacgagatgcaggatgtgatgcattttaactacactgcatggcctgatcatggtgtgcccacagcaaatgctgcagaaagtatcctgcagtttgtacacatggtccgacagcaagctaccaagagcaaaggtcccatgatcattcactgcagtgctggcgtgggacggacaggaacattcattgccctggacaggctcttgcagcacattcgggatcatgagtttgttgacatcttagggctggtgtcagaaatgaggtcataccggatgtctatggtacagacagaggagcagtacatttttatccatcagtgtgtgcaactgatgtggatgaagaagaagcagcagttctgcatcagtgatgtcatatacgagaatgttagcaagtcctagttcagaatccggagcagagaggacatgatgtgcgcccatcctcccttgcttccagattgttttagtgggccctgatggtcatttttctaaacagaggccctgctttgtaatatgtggccaaggagataatttatctcacagaagcaccgggaagacttagccttaaagagcctacagtgtccttttggactctttcacttcgggacatttaataatggaccaaattcaacagaacaccaggaaggtcaagacgctctccaaagggcaggaagtacagcacttccgaagagtttagttggccctttgctggttgggctgagttttttatttttaagtgtttgtttttcagtgcaataatttttgtgtgtgtgtgattcttatcagaaagttgaattgttttctgcctacaccgttcatcagccccataacccaggaaggaacaggcattgttagcatcagattatacctcattattaaaaggaggcatggccacacatgaagaaatggtcattctacttcaaagaaattgagccagcactatctgtactccaacattaccggatctggattggggaggttggtcagggaagagaggggttctacccacagatcaactgtgtaatcttttactattcaagctataattcagcttcaaagtagagtagaaaaaaaattgtcttaactgttctagttcttgatggttttcttccttattaacagttggtgtttcttccttggcccttttggactaatgttactgtccaagttctttctcaagaaaccacatctggttcagaagagtgtcaagttggactctttgaactctgttgctgtctgagcaatcgtggtgcctagactttgcattccttgttctgttgacctgcatacatgtgagagctatttctttaagaactatataggctgtgaaaacgcactttctttcccccaaagagctgggaatttatgaagttatggcaatgaactgcagcatgctgggacaattatttgactacttttttttgtaatattgtcaaatgtctctatggattctgacagagatttctttttgttttgttattcttttggttgtcagtttcattttaacgagtgtaactagtaacattttattctttggattttgtataattacagtacatgattgtgtattgtgacatgaatgctgtcaaaatgacattgatggcattgtgaagcctgttactttgtgtcacttcctgataaataagaggtgatgacatggatatacaacagaaaacactttgagttgaaagtaaacacaagctggctgcttccctgtggcaactgtggct

SEQ ID NO: 1914 - protein, 1216 aa, Homo sapiens
MGHLPTGIHGARRLLPLLWLFVLFKNATAFHVTVQDDNNIVVSLEASDVISPASVYVVKITGESKNYFFEFEEFNSTLPPPVIFKASYHGLYYIITLVVVNGNVVTKPSRSITVLTKPLPVTSVSIYDYKPSPETGVLFEIHYPEKYNVFTRVNISYWEGKDFRTMLYKDFFKGKTVFNHWLPGMCYSNITFQLVSEATFNKSTLVEYSGVSHEPKQHRTAPYPPQNISVRIVNLNKNNWEEQSGNFPEESFMRSQDTIGKEKLFHFTEETPEIPSGNISSGWPDFNSSDYETTSQPYWWDSASAAPESEDEFVSVLPMEYENNSTLSETEKSTSGSFSFFPVQMILTWLPPKPPTAFDGFHIHIEREENFTEYLMVDEEAHEFVAELKEPGKYKLSVTTFSSSGSCETRKSQSAKSLSFYISPSGEWIEELTEKPQHVSVHVLSSTTALMSWTSSQENYNSTIVSVVSLTCQKQKESQRLEKQYCTQVNSSKPIIENLVPGAQYQVVIYLRKGPLIGPPSDPVTFAIVPTGIKDLMLYPLGPTAVVLSWTRPYLGVFRKYVVEMFYFNPATMTSEWTTYYEIAATVSLTASVRIANLLPAWYYNFRVTMVTWGDPELSCCDSSTISFITAPVAPEITSVEYFNSLLYISWTYGDDTTDLSHSRMLHWMVVAEGKKKIKKSVTRNVMTAILSLPPGDIYNLSVTACTERGSNTSMLRLVKLEPAPPKSLFAVNKTQTSVTLLWVEEGVADFFEVFCQQVGSSQKTKLQEPVAVSSHVVTISSLLPATAYNCSVTSFSHDSPSVPTFIAVSTMVTEMNPNVVVISVLAILSTLLIGLLLVTLIILRKKHLQMARECGAGTFVNFASLERDGKLPYNWRRSIFAFLTLLPSCLWTDYLLAFYINPWSKNGLKKRKLTNPVQLDDFDAYIKDMAKDSDYKFSLQFEELKLIGLDIPHFAADLPLNRCKNRYTNILPYDFSRVRLVSMNEEEGADYINANYIPGYNSPQEYIATQGPLPETRNDFWKMVLQQKSQIIVMLTQCNEKRRVKCDHYWPFTEEPIAYGDITVEMISEEEQDDWACRHFRINYADEMQDVMHFNYTAWPDHGVPTANAAESILQFVHMVRQQATKSKGPMIIHCSAGVGRTGTFIALDRLLQHIRDHEFVDILGLVSEMRSYRMSMVQTEEQYIFIHQCVQLMWMKKKQQFCISDVIYENVSKS

SEQ ID NO: 1915 - DNA, 5069 bp, Homo sapiens
gggcgcagaggaggaaagggagcaggcgcagggggactggaaaggcagcatgcgctcgccaggagcaacctcggcgcccagggtctgaggctgcagccccagttcgccattgtgagccgccgccgggggagtccgctagcgcagccgtgcccccgagtccccgtccgcgcagcgatggggcacctgcccacggggatacacggcgcccgccgcctcctgcctctgctctggctctttgtgctgttcaagaatgctacagctttccatgtaactgtccaagatgataataacatcgttgtctcattagaagcttcagacgtcatcagtccagcatctgtgtatgttgtgaagataactggtgaatccaaaaattatttcttcgaatttgaggaattcaacagcactttgcctcctcctgttattttcaaggccagttatcatggcctttattatataatcactctggtagtggtaaatggaaatgtggtgaccaagccatccagatcaatcactgtgttaacaaaacctctacctgtaaccagtgtttccatatatgactataaaccttctcctgaaacaggagtcctgtttgaaatacattatccagaaaaatataacgttttcacaagagtgaacattagctactgggaaggtaaagacttccggacaatgctatataaagatttctttaagggaaaaacagtatttaatcactggctgccaggaatgtgttatagtaatatcacctttcagctggtatctgaggcaacttttaataaaagtacccttgttgagtacagtggtgtcagtcacgaacccaaacagcacagaactgccccttatccacctcaaaatatttccgttcgtatcgtaaacttgaacaaaaacaactgggaagaacagagtggcaatttcccagaagaatccttcatgagatcacaagatacaataggaaaagaaaaactcttccattttacagaagaaacccctgaaattccctcgggcaacatttcttccggttggcctgattttaatagcagtgactatgaaactacgtctcagccatattggtgggacagtgcatctgcagctcctgaaagtgaagatgaatttgtcagcgtacttcccatggaatacgaaaataacagtacactcagtgagacagagaagtcaacatcaggctctttctcctttttccctgtgcaaatgatattgacctggttaccacccaaaccacccactgcttttgatgggttccatatccatattgaacgagaagagaactttactgaatatttgatggtggatgaagaagcacatgaatttgttgcagaactgaaggaacctgggaaatataagttatctgtgacaacctttagttcctcaggatcttgtgaaactcgaaaaagtcagtcagcaaaatcactcagcttttatatcagtccttcaggagagtggattgaagaactgaccgagaagccgcagcacgtgagtgtccacgttttaagctcaaccactgccttgatgtcctggacatcttcccaagagaactacaacagcaccattgtgtctgtggtgtcgctgacctgccagaaacaaaaggagagccagaggcttgaaaagcagtactgcactcaggtgaactcaagcaaacctattattgaaaatctggttcctggtgcccagtaccaggttgtaatatacctaaggaaaggccctttgattggaccaccttcagatcctgtgacatttgctattgttcccacaggaataaaggatttaatgctctatcctttgggtcctacggccgtggttctgagctggaccagaccttatttaggcgtgttcagaaaatacgtggttgaaatgttttatttcaaccctgctacaatgacatcagagtggaccacctactatgaaatagcagcaactgtttccttaactgcatccgtgagaatagctaatctgctgccagcatggtactacaacttccgggttaccatggtgacgtggggagatccagaattgagctgctgtgacagctctaccatcagcttcataacagccccagtggctccggaaatcacttctgtggaatatttcaacagtctgttatatatcagttggacatatggggatgatacaacggacttgtcccattctagaatgcttcactggatggtggttgcagaaggaaaaaagaaaattaaaaagagtgtaacacgcaatgtcatgactgcaattctcagcttgcctccaggcgacatctataacctctcagtaactgcttgtactgaaagaggaagtaatacctccatgctccgccttgtcaagctagaaccagctccacccaaatcactcttcgcagtgaacaaaacccagacttcagtgactttgctgtgggtggaagagggagtagctgatttctttgaagttttctgtcaacaagttggctccagtcagaaaaccaaacttcaggaaccagttgctgtttcttcccatgtcgtgaccatctccagccttcttcctgccactgcctacaattgtagtgtcaccagctttagccatgacagccccagtgtccctacgttcatagccgtctcaacaatggttacagagatgaatcccaatgtggtagtgatctccgtgctggccatccttagcacacttttaattggactgttgcttgttaccctcattattcttaggaaaaagcatctgcagatggctagggagtgtggagctggtacatttgtcaattttgcatccttagagagggatggaaagcttccatacaactggagtaaaaatggtttaaagaagaggaaactgacaaacccggttcaactggatgactttgatgcctatattaaggatatggccaaagactctgactataaattttctcttcagtttgaggagttgaaattgattggactggatatcccacactttgctgcagatcttccactgaatcgatgtaaaaaccgttacacaaacatcctaccatatgacttcagccgtgtgagattagtctccatgaatgaagaggaaggtgcagactacatcaatgccaactatattcctggatacaactcaccccaggagtatattgccacccaggggccactgcctgaaaccagaaatgacttctggaagatggtcctgcaacaaaagtctcagattattgtcatgctcactcagtgtaatgagaaaaggagggtgaaatgtgaccattactggccattcacggaagaacctatagcctatggagacatcactgtggagatgatttcagaggaagagcaggacgactgggcctgtagacacttccggatcaactatgctgacgagatgcaggatgtgatgcattttaactacactgcatggcctgatcatggtgtgcccacagcaaatgctgcagaaagtatcctgcagtttgtacacatggtccgacagcaagctaccaagagcaaaggtcccatgatcattcactgcagtgctggcgtgggacggacaggaacattcattgccctggacaggctcttgcagcacattcgggatcatgagtttgttgacatcttagggctggtgtcagaaatgaggtcataccggatgtctatggtacagacagaggagcagtacatttttatccatcagtgtgtgcaactgatgtggatgaagaagaagcagcagttctgcatcagtgatgtcatatacgagaatgttagcaagtcctagttcagaatccggagcagagaggacatgatgtgcgcccatcctcccttgcttccagattgttttagtgggccctgatggtcatttttctaaacagaggccctgctttgtaatatgtggccaaggagataatttatctcacagaagcaccgggaagacttagccttaaagagcctacagtgtccttttggactctttcacttcgggacatttaataatggaccaaattcaacagaacaccaggaaggtcaagacgctctccaaagggcaggaagtacagcacttccgaagagtttagttggccctttgctggttgggctgagttttttatttttaagtgtttgtttttcagtgcaataatttttgtgtgtgtgtgattcttatcagaaagttgaattgttttctgcctacaccgttcatcagccccataacccaggaaggaacaggcattgttagcatcagattatacctcattattaaaaggaggcatggccacacatgaagaaatggtcattctacttcaaagaaattgagccagcactatctgtactccaacattaccggatctggattggggaggttggtcagggaagagaggggttctacccacagatcaactgtgtaatcttttactattcaagctataattcagcttcaaagtagagtagaaaaaaaattgtcttaactgttctagttcttgatggttttcttccttattaacagttggtgtttcttccttggcccttttggactaatgttactgtccaagttctttctcaagaaaccacatctggttcagaagagtgtcaagttggactctttgaactctgttgctgtctgagcaatcgtggtgcctagactttgcattccttgttctgttgacctgcatacatgtgagagctatttctttaagaactatataggctgtgaaaacgcactttctttcccccaaagagctgggaatttatgaagttatggcaatgaactgcagcatgctgggacaattatttgactacttttttttgtaatattgtcaaatgtctctatggattctgacagagatttctttttgttttgttattcttttggttgtcagtttcattttaacgagtgtaactagtaacattttattctttggattttgtataattacagtacatgattgtgtattgtgacatgaatgctgtcaaaatgacattgatggcattgtgaagcctgttactttgtgtcacttcctgataaataagaggtgatgacatggatatacaacagaaaacactttgagttgaaagtaaacacaagctggctgcttccctgtggcaactgtggct

SEQ ID NO: 1916 - protein, 1188 aa, Homo sapiens
MGHLPTGIHGARRLLPLLWLFVLFKNATAFHVTVQDDNNIVVSLEASDVISPASVYVVKITGESKNYFFEFEEFNSTLPPPVIFKASYHGLYYIITLVVVNGNVVTKPSRSITVLTKPLPVTSVSIYDYKPSPETGVLFEIHYPEKYNVFTRVNISYWEGKDFRTMLYKDFFKGKTVFNHWLPGMCYSNITFQLVSEATFNKSTLVEYSGVSHEPKQHRTAPYPPQNISVRIVNLNKNNWEEQSGNFPEESFMRSQDTIGKEKLFHFTEETPEIPSGNISSGWPDFNSSDYETTSQPYWWDSASAAPESEDEFVSVLPMEYENNSTLSETEKSTSGSFSFFPVQMILTWLPPKPPTAFDGFHIHIEREENFTEYLMVDEEAHEFVAELKEPGKYKLSVTTFSSSGSCETRKSQSAKSLSFYISPSGEWIEELTEKPQHVSVHVLSSTTALMSWTSSQENYNSTIVSVVSLTCQKQKESQRLEKQYCTQVNSSKPIIENLVPGAQYQVVIYLRKGPLIGPPSDPVTFAIVPTGIKDLMLYPLGPTAVVLSWTRPYLGVFRKYVVEMFYFNPATMTSEWTTYYEIAATVSLTASVRIANLLPAWYYNFRVTMVTWGDPELSCCDSSTISFITAPVAPEITSVEYFNSLLYISWTYGDDTTDLSHSRMLHWMVVAEGKKKIKKSVTRNVMTAILSLPPGDIYNLSVTACTERGSNTSMLRLVKLEPAPPKSLFAVNKTQTSVTLLWVEEGVADFFEVFCQQVGSSQKTKLQEPVAVSSHVVTISSLLPATAYNCSVTSFSHDSPSVPTFIAVSTMVTEMNPNVVVISVLAILSTLLIGLLLVTLIILRKKHLQMARECGAGTFVNFASLERDGKLPYNWSKNGLKKRKLTNPVQLDDFDAYIKDMAKDSDYKFSLQFEELKLIGLDIPHFAADLPLNRCKNRYTNILPYDFSRVRLVSMNEEEGADYINANYIPGYNSPQEYIATQGPLPETRNDFWKMVLQQKSQIIVMLTQCNEKRRVKCDHYWPFTEEPIAYGDITVEMISEEEQDDWACRHFRINYADEMQDVMHFNYTAWPDHGVPTANAAESILQFVHMVRQQATKSKGPMIIHCSAGVGRTGTFIALDRLLQHIRDHEFVDILGLVSEMRSYRMSMVQTEEQYIFIHQCVQLMWMKKKQQFCISDVIYENVSKS

SEQ ID NO: 1917 - DNA, 5927 bp, Homo sapiens
atggggcacctgcccacggggatacacggcgcccgccgcctcctgcctctgctctggctctttgtgctgttcaagaatgctacagctttccatgtaactgtccaagatgataataacatcgttgtctcattagaagcttcagacgtcatcagtccagcatctgtgtatgttgtgaagataactggtgaatccaaaaattatttcttcgaatttgaggaattcaacagcactttgcctcctcctgttattttcaaggccagttatcatggcctttattatataatcactctggtagtggtaaatggaaatgtggtgaccaagccatccagatcaatcactgtgttaacaaaacctctacctgtaaccagtgtttccatatatgactataaaccttctcctgaaacaggagtcctgtttgaaatacattatccagaaaaatataacgttttcacaagagtgaacattagctactgggaaggtaaagacttccggacaatgctatataaagatttctttaagggaaaaacagtatttaatcactggctgccaggaatgtgttatagtaatatcacctttcagctggtatctgaggcaacttttaataaaagtacccttgttgagtacagtggtgtcagtcacgaacccaaacagcacagaactgccccttatccacctcaaaatatttccgttcgtatcgtaaacttgaacaaaaacaactgggaagaacagagtggcaatttcccagaagaatccttcatgagatcacaagatacaataggaaaagaaaaactcttccattttacagaagaaacccctgaaattccctcgggcaacatttcttccggttggcctgattttaatagcagtgactatgaaactacgtctcagccatattggtgggacagtgcatctgcagctcctgaaagtgaagatgaatttgtcagcgtacttcccatggaatacgaaaataacagtacactcagtgagacagagaagtcaacatcaggctctttctcctttttccctgtgcaaatgatattgacctggttaccacccaaaccacccactgcttttgatgggttccatatccatattgaacgagaagagaactttactgaatatttgatggtggatgaagaagcacatgaatttgttgcagaactgaaggaacctgggaaatataagttatctgtgacaacctttagttcctcaggatcttgtgaaactcgaaaaagtcagtcagcaaaatcactcagcttttatatcagtccttcaggagagtggattgaagaactgaccgagaagccgcagcacgtgagtgtccacgttttaagctcaaccactgccttgatgtcctggacatcttcccaagagaactacaacagcaccattgtgtctgtggtgtcgctgacctgccagaaacaaaaggagagccagaggcttgaaaagcagtactgcactcaggtgaactcaagcaaacctattattgaaaatctggttcctggtgcccagtaccaggttgtaatatacctaaggaaaggccctttgattggaccaccttcagatcctgtgacatttgctattgttcccacaggaataaaggatttaatgctctatcctttgggtcctacggccgtggttctgagctggaccagaccttatttaggcgtgttcagaaaatacgtggttgaaatgttttatttcaaccctgctacaatgacatcagagtggaccacctactatgaaatagcagcaactgtttccttaactgcatccgtgagaatagctaatctgctgccagcatggtactacaacttccgggttaccatggtgacgtggggagatccagaattgagctgctgtgacagctctaccatcagcttcataacagccccagtggctccggaaatcacttctgtggaatatttcaacagtctgttatatatcagttggacatatggggatgatacaacggacttgtcccattctagaatgcttcactggatggtggttgcagaaggaaaaaagaaaattaaaaagagtgtaacacgcaatgtcatgactgcaattctcagcttgcctccaggcgacatctataacctctcagtaactgcttgtactgaaagaggaagtaatacctccatgctccgccttgtcaagctagaaccagctccacccaaatcactcttcgcagtgaacaaaacccagacttcagtgactttgctgtgggtggaagagggagtagctgatttctttgaagttttctgtcaacaagttggctccagtcagaaaaccaaacttcaggaaccagttgctgtttcttcccatgtcgtgaccatctccagccttcttcctgccactgcctacaattgtagtgtcaccagctttagccatgacagccccagtgtccctacgttcatagccgtctcaacaatggttacagagatgaatcccaatgtggtagtgatctccgtgctggccatccttagcacacttttaattggactgttgcttgttaccctcattattcttaggaaaaagcatctgcagatggctagggagtgtggagctggtacatttgtcaattttgcatccttagagagggatggaaagcttccatacaactggagtaaaaatggtttaaagaagaggaaactgacaaacccggttcaactggatgactttgatgcctatattaaggatatggccaaagactctgactataaattttctcttcagtttgaggagttgaaattgattggactggatatcccacactttgctgcagatcttccactgaatcgatgtaaaaaccgttacacaaacatcctaccatatgacttcagccgtgtgagattagtctccatgaatgaagaggaaggtgcagactacatcaatgccaactatattcctggatacaactcaccccaggagtatattgccacccaggggccactgcctgaaaccagaaatgacttctggaagatggtcctgcaacaaaagtctcagattattgtcatgctcactcagtgtaatgagaaaaggagggtgaaatgtgaccattactggccattcacggaagaacctatagcctatggagacatcactgtggagatgatttcagaggaagagcaggacgactgggcctgtagacacttccggatcaactatgctgacgagatgcaggatgtgatgcattttaactacactgcatggcctgatcatggtgtgcccacagcaaatgctgcagaaagtatcctgcagtttgtacacatggtccgacagcaagctaccaagagcaaaggtcccatgatcattcactgcagtgctggcgtgggacggacaggaacattcattgccctggacaggctcttgcagcacattcgggatcatgagtttgttgacatcttagggctggtgtcagaaatgaggtcataccggatgtctatggtacagacagaggagcagtacatttttatccatcagtgtgtgcaactgatgtggatgaagaagaagcagcagttctgcatcagtgatgtcatatacgagaatgttagcaagtcctagttcagaatccggagcagtaagtggagaagagctctccacgagtgctcagtcttagaactattagagggggatgtgatggatgggacaaaagacagcagtagccatttgtattgactctgacttcacatgagtatttcttcccagctcctggcctcacatgggtggtcacagggagaaacaagtactgtagcagatctttgagtttcaatgcaccttggttggtgttggcaacaaacaggagcttctgcacatcatgatgactttacctccattccctctacccagaaccctaaattattctgttattggatctgtgcctgtaatatcaggatactaccatccaaatctatctagatatcttgtgcaaatattttattgattacaagggctgtatacggggttacaaaaagacatgagctggattggacactcctaaaaccaaaaacaacagtgacaatagagtctcaggatagcagagtctgaaaataccttggtctcccccattatgtgagcccttacttgagagcttcatgaagacacttgtaacatattcaacgtcctgtactccagttttgactacgagatcagattttggaggtgtaagtaaacttggctgaggtaacagtaatctgcccatttagttcagtaaacagactgtagagtgtctgactatactgggggaagaggagccaatgacagggtagggagatgacagtggtgcatgatgggagaatcatgaaagtctgggaagcatatggaccagtgggaaggataggattagcactgcacctctacatccatcaagagagacagagcgcacaatggagcaggaaggataaaaaataaagaaagacagagagaaacaaatttgctgggagagggaaagacattcagacccacagaaaggaggcagcacacagagaaagatgcacagatcaacccacatctgcatgggttgtgagactgagcatagtgagagcagtggtggagcaatagaagattgctgtgacaccaggctgcttactgtctttctttgtctcattcacaggagaggacatgatgtgcgcccatcctcccttgcttccagattgttttagtgggccctgatggtcatttttctaaacagaggccctgctttgtaatatgtggccaaggagataatttatctcacagaagcaccgggaagacttagccttaaagagcctacagtgtccttttggactctttcacttcgggacatttaataatggaccaaattcaacagaacaccaggaaggtcaagacgctctccaaagggcaggaagtacagcacttccgaagagtttagttggccctttgctggttgggctgagttttttatttttaagtgtttgtttttcagtgcaataatttttgtgtgtgtgtgattcttatcagaaagttgaattgttttctgcctacaccgttcatcagccccataacccaggaaggaacaggcattgttagcatcagattatacctcattattaaaaggaggcatggccacacatgaagaaatggtcattctacttcaaagaaattgagccagcactatctgtactccaacattaccggatctggattggggaggttggtcagggaagagaggggttctacccacagatcaactgtgtaatcttttactattcaagctataattcagcttcaaagtagagtagaaaaaaaattgtcttaactgttctagttcttgatggttttcttccttattaacagttggtgtttcttccttggcccttttggactaatgttactgtccaagttctttctcaagaaaccacatctggttcagaagagtgtcaagttggactctttgaactctgttgctgtctgagcaatcgtggtgcctagactttgcattccttgttctgttgacctgcatacatgtgagagctatttctttaagaactatataggctgtgaaaacgcactttctttcccccaaagagctgggaatttatgaagttatggcaatgaactgcagcatgctgggacaattatttgactacttttttttgtaatattgtcaaatgtctctatggattctgacagagatttctttttgttttgttattcttttggttgtcagtttcattttaacgagtgtaactagtaacattttattctttggattttgtataattacagtacatgattgtgtattgtgacatgaatgctgtcaaaatgacattgatggcattgtgaagcctgttactttgtgtcacttcctgataaataagaggtgatgacatggatatacaacagaaaacactttgagttgaaagtaaacacaagctggctgcttccctgtggcaactgtggct

SEQ ID NO: 1918 - protein, 1188 aa, Homo sapiens; identical to SEQ ID NO: 1916

SEQ ID NO: 1919 - DNA, 5356 bp, Homo sapiens
ggggccggtctcgcgcggtctagaagtggagttgctggcggctgcggcggtgacggcggcgacggaggaggcaggcggtggggcgggggcggggactaaggattctgaggtggggagtcgggagtttctggattctttatccggaatttcaagggccgccggagggctgtcgcttctgcagtgcgtaggagcggccggggcgggaggctccgcggagccgaggcgtggagaataagaaagccttgagttttgtgaaaaaccggagaagagaaactaaaaggacagtagaaaaggcttttccagtttgcataatatttccttcatggatactttttcatagcattattatgtgatgtgagaagtttttttttttgaagtaacatggattttatactacagaatcaagagaattggcttataggaaaaattgatttataaaaagtggtacaggttttcatagataaccatgacaacatcccatatgaatgggcatgttacagaggaatcagacagcgaagtaaaaaatgttgatcttgcatcaccagaggaacatcagaagcaccgagagatggctgttgactgccctggagatttgggcaccaggatgatgccaatacgtcgaagtgcacagttggagcgtattcggcaacaacaggaggacatgaggcgtaggagagaggaagaagggaaaaagcaagaacttgaccttaattcttccatgagacttaagaaactagcccaaattcctccaaagaccggaatagataaccctatgtttgatacagaggaaggaattgtcttagaaagtcctcattatgctgtgaaaatattagaaatagaagacttgttttcttcacttaaacatatccaacatactttggtagattctcagagccaggaggatatttcactgcttttacaacttgttcaaaataaggatttccagaatgcatttaagatacacaatgccatcacagtacacatgaacaaggccagtcctccatttcctcttatctccaacgcacaagatcttgctcaagaggtacaaactgttttgaagccagttcatcataaggaaggacaagaactaactgctttgctgaatactccacatattcaggcacttttactggcccacgataaggttgctgagcaggaaatgcagctagagcccattacagatgagagagtttatgaaagtattggccagtatggaggagaaactgtaaaaatagttcgtatagaaaaggctcgtgatattccgttgggtgctacagttcgtaatgaaatggactctgtcatcattagccggatagtaaaagggggtgctgcagagaaaagtggtctgttgcatgaaggagatgaagttctagagattaatggcattgaaattcgggggaaagatgtcaatgaggtttttgacttgttgtctgatatgcatggtactttgacttttgtcctgattcccagtcaacagatcaagccgcctcctgccaaggaaacagtaatccatgtaaaagctcattttgactatgacccctcagatgacccttatgttccatgtcgagagttaggtctgtcttttcaaaaaggtgatatacttcatgtgatcagtcaagaagatccaaactggtggcaggcctacagggaaggggacgaagataatcaacctctagccgggcttgttccagggaaaagctttcagcagcaaagggaagccatgaaacaaaccatagaagaagataaggagccagaaaaatcaggaaaactgtggtgtgcaaagaagaataaaaagaagaggaaaaaggttttatataatgccaataaaaatgatgattatgacaacgaggagatcttaacctatgaggaaatgtcactttatcatcagccagcaaataggaagagacctatcatcttgattggtccacagaactgtggccagaatgaattgcgtcagaggctcatgaacaaagaaaaggaccgctttgcatctgcagttcctcatacaacccggagtaggcgagaccaagaagtagccggtagagattaccactttgtttcgcggcaagcattcgaggcagacatagcagctggaaagttcattgagcatggtgaatttgagaagaatttgtatggaactagcatagattctgtacggcaagtgatcaactctggcaaaatatgtcttttaagtcttcgtacacagtcattgaagactctccggaattcagatttgaaaccatatattatcttcattgcacccccttcacaagaaagacttcgggcattattggccaaagaaggcaagaatccaaagcctgaagagttgagagaaatcattgagaagacaagagagatggagcagaacaatggccactactttgatacggcaattgtgaattccgatcttgataaagcctatcaggaattgcttaggttaattaacaaacttgatactgaacctcagtgggtaccatccacttggctgaggtgaaagaaacatccattctgtggcatgttggacttgatctggcaaaaactgccaataggaggactgcccgacactgcagcaagattgaggataagatggaaggcagcagtataagctgtagatctgttcttagatctcttgaattagtgagacgacagttcccttaggcagtttgtgcatggcatcctttattctctatacatggctttagcggttcttgcctcattttgggattctaaatggaagctttcaacagagcattccattttgtcctgttaaaaccttttgttttcacctaaaccctttctgcttagttgtatctctgtgaaaaacttgtatacacaagcgtccatgtctcacacaaatattgatgtgattattcttaagtgttaaatcattaacacttaaatgacttcattgggaatattgagcagagggactgtgcttctatgcactgggcaaggcagtatttgcttaggaaactaatttagtcatcagagatactttcctaaaaaggaaaaataaaaaacaaaatggtgccactttgggttgaagctactttgttaggcttgaattcatttatatgtcttttgattcttaaaaaaacaaaaaacattccattagaagcaccagtttttttgctcagactttgtggatcagactctacactcaacacactctaatctacttaaaggtatacaaaatatgctgatcttttttaaattatgatttcctgaatttttttcttaagtcgtctcaactgatttactcacttagcttcccttccctcatcagcatagtataatagaatgtatgttacatttttatgaatggcaggtgttcattataatctgtattgacttaaaaagtttcttcctcatgatgctaatagttttttgtatacatgggaggatagcacatttgacagtttttgcatttttatgtatgagcacagtatcctatgactgtgctacgtatatataggtaataaactggaattctgttgatgaatatagctgctgtactgtatattaatatttaatagatcaacaaatggtcattgaaaacacttgtttagcattagaataaaattatatatgtccttgggaaatattatgacagttgactttaagatcaaaaggaagggaagacctgaaagtcatttgaacattttaggaaaagaatattggagagaaaaaggtattaaatatatagaaataggtttttaacctaacaaggtctgcctcttatgacgagaatgcaacagcttggtaaatcataaaagaaacatttaagctaataggattttcgtactgtctctatagctgtagctttaaaattcaacgtatataattggcatggaaacttaatttgcagtcttttcaagcctttaggatagtgtgatgtgtaacaaacaacctcaaatgtgaatgccttgattttatttttatggtgactttagctacagcatttcctatacccagagctaaacactggaataatactgacatcatttaatttaacataagcaattatgtttaaggagtaatttgtgtcatgtacatatttgattgattttttttcttctacataattttatttgaacaaatgtagacagtttatatgtcgcctttttctgttcaaatttgcatggcctattaagttggctggagagtgttttatgtggaaatattttcaagataatgttccttaggaagaaaataacattcttgggttgagggaaggaatgccatacactactgtctcttcagatctgaaatactccagtttagagccaggaaatttcacaggtcacaccgatttttagcattaaaaactaaggaatatacttagcacttacttaatcttttcagttttccagtttacgtctcaggaatgaagtgtagtctatggttgacaatggagttttgtgatcctgcttattgtaactgacaactgttttcaactccaagagctaaactattggcagttcatgttaagttagagtgagggtgtaggtagtgtcagtgagtggctcttgtgcctgctgtagacattaggcctgcactagggccatgtgctgtcaagattcaggaacatggctttaacaagcagatcttgtatcaaggcagaggtgatgccatgccatacttttaggaagtctgagatgataaatatttcaaggtcagtgaagtctatcaatcattctccccttcctcatcagcaatggtagatagaaatgtcctaaacttttctaaatcctagtgatgaggatgtgctgatattcaacatagtccttaaagtgaaaactgagttgttgctgacctccacaaaagaatatggaaaaaagccttgctgtacacctagttgtacagccactctggccaattccatttcctgtccctctgtggttctgactggagaccccagtgtgggggaggtcttaccatttaatatagaaatgatatcaataactaatgctatgtacttggaaaatccaaataaggaagttttaggttggtgcataactttgtttctcaaattttcgttgtcagaacaaatggaaggagaatattatttagactaatccagatttgctttctatgaaaatctaatgtctggattatcttccttttctcatggcctaagaaataaggatcaataaggaatgatttgaatgtaattttgtgaatgtgtggaaaatataaagcagggatttagccttaataaaggtaaccttctgacatctgttgttaatccccctttgtactcttttcctgtatctgcactgttattttgagatgtcatactgtacactgtattgtaaaaataaaaagtaaaattatatttcaaattttaaaagcc

SEQ ID NO: 1920 - protein, 675 aa, Homo sapiens
MTTSHMNGHVTEESDSEVKNVDLASPEEHQKHREMAVDCPGDLGTRMMPIRRSAQLERIRQQQEDMRRRREEEGKKQELDLNSSMRLKKLAQIPPKTGIDNPMFDTEEGIVLESPHYAVKILEIEDLFSSLKHIQHTLVDSQSQEDISLLLQLVQNKDFQNAFKIHNAITVHMNKASPPFPLISNAQDLAQEVQTVLKPVHHKEGQELTALLNTPHIQALLLAHDKVAEQEMQLEPITDERVYESIGQYGGETVKIVRIEKARDIPLGATVRNEMDSVIISRIVKGGAAEKSGLLHEGDEVLEINGIEIRGKDVNEVFDLLSDMHGTLTFVLIPSQQIKPPPAKETVIHVKAHFDYDPSDDPYVPCRELGLSFQKGDILHVISQEDPNWWQAYREGDEDNQPLAGLVPGKSFQQQREAMKQTIEEDKEPEKSGKLWCAKKNKKKRKKVLYNANKNDDYDNEEILTYEEMSLYHQPANRKRPIILIGPQNCGQNELRQRLMNKEKDRFASAVPHTTRSRRDQEVAGRDYHFVSRQAFEADIAAGKFIEHGEFEKNLYGTSIDSVRQVINSGKICLLSLRTQSLKTLRNSDLKPYIIFIAPPSQERLRALLAKEGKNPKPEELREIIEKTREMEQNNGHYFDTAIVNSDLDKAYQELLRLINKLDTEPQWVPSTWLR

SEQ ID NO: 1921 - DNA, 3278 bp, Homo sapiens
gacagcactgagctctgccgcctggctctagccgcctgcctggcccccgccgggactcttgcccaccctcagccatggctccgatatctctgtcgtggctgctccgcttggccaccttctgccatctgactgtcctgctggctggacagcaccacggtgtgacgaaatgcaacatcacgtgcagcaagatgacatcaaagatacctgtagctttgctcatccactatcaacagaaccaggcatcatgcggcaaacgcgcaatcatcttggagacgagacagcacaggctgttctgtgccgacccgaaggagcaatgggtcaaggacgcgatgcagcatctggaccgccaggctgctgccctaactcgaaatggcggcaccttcgagaagcagatcggcgaggtgaagcccaggaccacccctgccgccgggggaatggacgagtctgtggtcctggagcccgaagccacaggcgaaagcagtagcctggagccgactccttcttcccaggaagcacagagggccctggggacctccccagagctgccgacgggcgtgactggttcctcagggaccaggctccccccgacgccaaaggctcaggatggagggcctgtgggcacggagcttttccgagtgcctcccgtctccactgccgccacgtggcagagttctgctccccaccaacctgggcccagcctctgggctgaggcaaagacctctgaggccccgtccacccaggacccctccacccaggcctccactgcgtcctccccagccccagaggagaatgctccgtctgaaggccagcgtgtgtggggtcagggacagagccccaggccagagaactctctggagcgggaggagatgggtcccgtgccagcgcacacggatgccttccaggactgggggcctggcagcatggcccacgtctctgtggtccctgtctcctcagaagggacccccagcagggagccagtggcttcaggcagctggacccctaaggctgaggaacccatccatgccaccatggacccccagaggctgggcgtccttatcactcctgtccctgacgcccaggctgccacccggaggcaggcggtggggctgctggccttccttggcctcctcttctgcctgggggtggccatgttcacctaccagagcctccagggctgccctcgaaagatggcaggagagatggcggagggccttcgctacatcccccggagctgtggtagtaattcatatgtcctggtgcccgtgtgaactcctctggcctgtgtctagttgtttgattcagacagctgcctgggatccctcatcctcatacccacccccacccaagggcctggcctgagctgggatgattggaggggggaggtgggatcctccaggtgcacaagctccaagctcccaggcattccccaggaggccagccttgaccattctccacctgccagggacagagggggtggcctcccaactcaccccagccccaaaactctcctctgctgctggctggttagaggttccctttgacgccatcccagccccaatgaacaattatttattaaatgcccagccccttctgacccatgctgccctgtgagtactacagtcctcccatctcacacatgagcatcaggccaggccctctgcccactccctgcaacctgattgtgtctcttggtcctgctgcagttgccagtcaccccggccacctgcggtgctatctcccccagccccatcctctgtacagagcccacgcccccactggtgacatgtcttttcttgcatgaggctagtgtggtgtttcctggcactgcttccagtgaggctctgcccttggttaggcattgtgggaaggggagataagggtatctggtgactttcctctttggtctacactgtgctgagtctgaaggctgggttctgatcctagttccaccatcaagccaccaacatactcccatctgtgaaaggaaagagggaggtaaggaatacctgtccccctgacaacactcattgacctgaggcccttctctccagcccctggatgcagcctcacagtccttaccagcagagcaccttagacagtccctgccaatggactaacttgtctttggaccctgaggcccagagggcctgcaagggagtgagttgatagcacagaccctgccctgtgggcccccaaatggaaatgggcagagcagagaccatccctgaaggccccgcccaggcttagtcactgagacagcccgggctctgcctcccatcacccgctaagagggagggagggctccagacacatgtccaagaagcccaggaaaggctccaggagcagccacattcctgatgcttcttcagagactcctgcaggcagccaggccacaagacccttgtggtcccaccccacacacgccagattctttcctgaggctgggctcccttcccacctctctcactccttgaaaacactgttctctgccctccaagaccttctccttcacctttgtccccaccgcagacaggaccagggatttccatgatgttttccatgagtcccctgtttgtttctgaaagggacgctacccgggaagggggctgggacatgggaaaggggaagttgtaggcataaagtcaggggttcccttttttggctgctgaaggctcgagcatgcctggatggggctgcaccggctggcctggcccctcagggtccctggtggcagctcacctctcccttggattgtccccgacccttgccgtctacctgaggggcctcttatgggctgggttctacccaggtgctaggaacactccttcacagatgggtgcttggaggaaggaaacccagctctggtccatagagagcaagacgctgtgctgccctgcccacctggcctctgcactcccctgctgggtgtggcgcagcatattcaggaagctcagggcctggctcaggtggggtcactctggcagctcagagagggtgggagtgggcccaatgcactttgttctggctcttccaggctgggagagccttccaggggtgggacaccctgtgatggggccctgcctcctttgtgaggaagccgctggggccagttggtcccccttccatggactttgttagtttctccaagcaggacatggacaaggatgatctaggaagactttggaaagagtaggaagactttggaaagacttttccaaccctcatcaccaacgtctgtgccattttgtattttactaataaaatttaaaagtcttgtg

SEQ ID NO: 1922 - protein, 397 aa, Homo sapiens
MAPISLSWLLRLATFCHLTVLLAGQHHGVTKCNITCSKMTSKIPVALLIHYQQNQASCGKRAIILETRQHRLFCADPKEQWVKDAMQHLDRQAAALTRNGGTFEKQIGEVKPRTTPAAGGMDESVVLEPEATGESSSLEPTPSSQEAQRALGTSPELPTGVTGSSGTRLPPTPKAQDGGPVGTELFRVPPVSTAATWQSSAPHQPGPSLWAEAKTSEAPSTQDPSTQASTASSPAPEENAPSEGQRVWGQGQSPRPENSLEREEMGPVPAHTDAFQDWGPGSMAHVSVVPVSSEGTPSREPVASGSWTPKAEEPIHATMDPQRLGVLITPVPDAQAATRRQAVGLLAFLGLLFCLGVAMFTYQSLQGCPRKMAGEMAEGLRYIPRSCGSNSYVLVPV

SEQ ID NO: 1923 - DNA, 1506 bp, Homo sapiens
atgcaggcgcgctactccgtgtccgaccccaacgccctgggagtggtgccctacctgagcgagcagaattactaccgggctgcgggcagctacggcggcatggccagccccatgggcgtctattccggccacccggagcagtacagcgcggggatgggccgctcctacgcgccctaccaccaccaccagcccgcggcgcctaaggacctggtgaagccgccctacagctacatcgcgctcatcaccatggccatccagaacgcgcccgagaagaagatcaccttgaacggcatctaccagttcatcatggaccgcttccccttctaccgggagaacaagcagggctggcagaacagcatccgccacaacctctcgctcaacgagtgcttcgtcaaggtgccccgcgacgacaagaagcccggcaagggcagttactggaccctggacccggactcctacaacatgttcgagaacggcagcttcctgcggcgccggcggcgcttcaaaaagaaggacgtgtccaaggagaaggaggagcgggcccacctcaaggagccgcccccggcggcgtccaagggcgccccggccaccccccacctagcggacgcccccaaggaggccgagaagaaggtggtgatcaagagcgaggcggcgtccccggcgctgccggtcatcaccaaggtggagacgctgagccccgagagcgcgctgcagggcagcccgcgcagcgcggcctccacgcccgccggctcccccgacggctcgctgccggagcaccacgccgcggcgcccaacgggctgcctggcttcagcgtggagaacatcatgaccctgcgaacgtcgccgccgggcggagagctgagcccgggggccggacgcgcgggcctggtggtgccgccgctggcgctgccctacgccgccgcgccgcccgccgcctacggccagccgtgcgctcagggcctggaggccggggccgccgggggctaccagtgcagcatgcgagcgatgagcctgtacaccggggccgagcggccggcgcacatgtgcgtcccgcccgccctggacgaggccctctcggaccacccgagcggccccacgtcgcccctgagcgctctcaacctcgccgccggccaggagggcgcgctcgccgccacgggccaccaccaccagcaccacggccaccaccacccgcaggcgccgccgcccccgccggctccccagccccagccgacgccgcagcccggggccgccgcggcgcaggcggcctcctggtatctcaaccacagcggggacctgaaccacctccccggccacacgttcgcggcccagcagcaaactttccccaacgtgcgggagatgttcaactcccaccggctggggattgagaactcgaccctcggggagtcccaggtgagtggcaatgccagctgccagctgccctacagatccacgccgcctctctatcgccacgcagccccctactcctacgactgcacgaaatactga

SEQ ID NO: 1924 - protein, 501 aa, Homo sapiens
MQARYSVSDPNALGVVPYLSEQNYYRAAGSYGGMASPMGVYSGHPEQYSAGMGRSYAPYHHHQPAAPKDLVKPPYSYIALITMAIQNAPEKKITLNGIYQFIMDRFPFYRENKQGWQNSIRHNLSLNECFVKVPRDDKKPGKGSYWTLDPDSYNMFENGSFLRRRRRFKKKDVSKEKEERAHLKEPPPAASKGAPATPHLADAPKEAEKKVVIKSEAASPALPVITKVETLSPESALQGSPRSAASTPAGSPDGSLPEHHAAAPNGLPGFSVENIMTLRTSPPGGELSPGAGRAGLVVPPLALPYAAAPPAAYGQPCAQGLEAGAAGGYQCSMRAMSLYTGAERPAHMCVPPALDEALSDHPSGPTSPLSALNLAAGQEGALAATGHHHQHHGHHHPQAPPPPPAPQPQPTPQPGAAAAQAASWYLNHSGDLNHLPGHTFAAQQQTFPNVREMFNSHRLGIENSTLGESQVSGNASCQLPYRSTPPLYRHAAPYSYDCTKY

SEQ ID NO: 1925 - DNA, 2808 bp, Homo sapiens
agttcgcctctgcagcctctgcggggaagtgccggggctgctcgaggctcagttcttaggactgcaaggaggcagccccggcgtgcggcggtgcgcacagtctagagtggccagggcgcgagagtgcaacgtcctcctggccccgagcgcgtcgtcgcgccccgggagcagaccctcgcccagcagttaccgccgtcccgactttccgttccagttgcagctcctgccgggcaacatgtcaagagccgccgccgctacagctgccgccgccacctggggaagagcagcagcagcagcggcggccgcgggcacacgggggcaataaaccgagccacccgggcgtccagcgtgccggggaaccctctctgcgctcactgcccggcgggacccacgccatgtgctgagccatgtccctggccgcgcccgcgggcagcgcatggggcagcgcctgagtggcggcagatcttgcctcgatgtccccggccggctcctaccgcagccgccgccgcccccgccgccggtgaggaggaagctcgcgctgctcttcgccatgctctgcgtctggctctatatgttcctgtactcgtgcgccggctcctgcgccgccgcgccggggctgctgctcctgggctctgggtcccgcgccgcacacgacccgccagccctggccacagctccggacgggacgccccccaggctgccgttccgggcgccgccagccaccccactggcttcaggcaaggagatggccgagggcgctgcgagcccggaggagcagagtcccgaggtgccggactccccaagccccatctccagctttttcagtgggtctgggagcaagcagctgccgcaggccatcatcatcggcgtgaagaagggcggcacgcgggcgctgctggagtttctgcgcgtgcaccccgacgtgcgcgccgtgggcgccgagccccatttcttcgatcgcagctacgacaagggcctcgcttggtaccgggacctgatgcccagaaccctggacgggcagatcaccatggagaagacgcccagttacttcgtcacgcgggaggcccctgcgcgcatctcggccatgtccaaggacaccaagctcatcgtggtggtgcgggacccggtgaccagggccatctcggactacacgcagacgctgtccaagcggcccgacatccccaccttcgagagcttgacgttcaaaaacaggacagcgggcctcatcgacacgtcgtggagcgccatccagatcggcatctacgccaagcacctggagcactggctgcgccacttccccatccgccagatgctcttcgtgagcggcgagcggctcatcagcgacccggccggggagctgggccgcgtgcaagacttcctgggcctcaagaggatcatcacggacaagcacttctacttcaacaagaccaagggcttcccctgcctgaagaaggcggagggcagcagccggccccattgcctgggcaagaccaagggcaggacccatcctgagatcgaccgcgaggtggtgcgcaggctgcgcgagttctaccggcctttcaacctcaagttctaccagatgaccgggcacgactttggctgggattgagcagacccgggctatgtaccttacccacgtggcttatctattgacagagattatatcataacatggcttgaagtaaaaggcagtatccaagtccttcacctggtcttgccctgtctactttctgatcattctgatggtctgatgtggctgttgatgtggaactgcagaagagttcagagaagagtatgcaacaaagccataggaaaacacacaggagcttttccctccccttcaggtccccgccctctttccaagctggacaattttttattaagttgtttattccctgccttaaaactgaaacaggaaattttctggtagaaggagggtcatttagtcacgaacactgaagtgggtcaaaattctattctgggtcaaatccttgaattcaaacagatgtccataatcagtactgatggaatagagcaagtttttctatgtaagacaaataaatcaaacatcatgtgcatctcctcataagggtctgcaagggtctgatggtttaaagttcctaacagatctggttgcagcatctgccggagcttgcaccccatcatcggacggtcatcttcctgctgcagaagttaggtaacataagacttagatttcttcctgttctagcaatctgcaagaccaccaggcttaactttttagctgccagaagacaaacccccttttctgtttcggcaatttgtcctggcacgtgttttggacttcctccgatttacacgaaaagctctgatattcattggagtactttattttttttcctcagttttgtttcttttctcatgtaaaaacaaacaaaaaggtcaacaaaaaaaaattgaggtttttcttgtttctatctagttcatgctttctttgcggtgtttgaacagtagtctgttaacttagtaggtggtacctggaaaggtattttaagtatagtgactgtttaataaatacttaattggatgatggaggaggagaaattgttttcttcccaggattctctttgggggtcattttgtgtgacagatatattttagacatttggagaaacagtttcagatcctgccaggatatttttgtaaaaaaggaaaatggaagattccaataaactagaaacagtacgtatctaagatgctgacacagaagctaatgtgacttttcagcttatcaagaggatggccaataaaacttaaaggtgtggttag

SEQ ID NO: 1926 - protein, 390 aa, Homo sapiens
MGQRLSGGRSCLDVPGRLLPQPPPPPPPVRRKLALLFAMLCVWLYMFLYSCAGSCAAAPGLLLLGSGSRAAHDPPALATAPDGTPPRLPFRAPPATPLASGKEMAEGAASPEEQSPEVPDSPSPISSFFSGSGSKQLPQAIIIGVKKGGTRALLEFLRVHPDVRAVGAEPHFFDRSYDKGLAWYRDLMPRTLDGQITMEKTPSYFVTREAPARISAMSKDTKLIVVVRDPVTRAISDYTQTLSKRPDIPTFESLTFKNRTAGLIDTSWSAIQIGIYAKHLEHWLRHFPIRQMLFVSGERLISDPAGELGRVQDFLGLKRIITDKHFYFNKTKGFPCLKKAEGSSRPHCLGKTKGRTHPEIDREVVRRLREFYRPFNLKFYQMTGHDFGWD

SEQ ID NO: 1927 - DNA, 5315 bp, Homo sapiens
agttcttaggactgcaaggaggcagccccggcgtgcggcggtgcgcacagtctagagtggccagggcgcgagagtgcaacgtcctcctggccccgagcgcgtcgtcgcgccccgggagcagaccctcgcccagcagttaccgccgtcccgactttccgttccagttgcagctcctgccgggcaacatgtcaagagccgccgccgctacagctgccgccgccacctggggaagagcagcagcagcagcggcggccgcgggcacacgggggcaataaaccgagccacccgggcgtccagcgtgccggggaaccctctctgcgctcactgcccggcgggacccacgccatgtgctgagccatgtccctggccgcgcccgcgggcagcgcatggggcagcgcctgagtggcggcagatcttgcctcgatgtccccggccggctcctaccgcagccgccgccgcccccgccgccggtgaggaggaagctcgcgctgctcttcgccatgctctgcgtctggctctatatgttcctgtactcgtgcgccggctcctgcgccgccgcgccggggctgctgctcctgggctctgggtcccgcgccgcacacgacccgccagccctggccacagctccggacgggacgccccccaggctgccgttccgggcgccgccagccaccccactggcttcaggcaaggagatggccgagggcgctgcgagcccggaggagcagagtcccgaggtgccggactccccaagccccatctccagctttttcagtgggtctgggagcaagcagctgccgcaggccatcatcatcggcgtgaagaagggcggcacgcgggcgctgctggagtttctgcgcgtgcaccccgacgtgcgcgccgtgggcgccgagccccatttcttcgatcgcagctacgacaagggcctcgcttggtaccgggacctgatgcccagaaccctggacgggcagatcaccatggagaagacgcccagttacttcgtcacgcgggaggcccctgcgcgcatctcggccatgtccaaggacaccaagctcatcgtggtggtgcgggacccggtgaccagggccatctcggactacacgcagacgctgtccaagcggcccgacatccccaccttcgagagcttgacgttcaaaaacaggacagcgggcctcatcgacacgtcgtggagcgccatccagatcggcatctacgccaagcacctggagcactggctgcgccacttccccatccgccagatgctcttcgtgagcggcgagcggctcatcagcgacccggccggggagctgggccgcgtgcaagacttcctgggcctcaagaggatcatcacggacaagcacttctacttcaacaagaccaagggcttcccctgcctgaagaaggcggagggcagcagccggccccattgcctgggcaagaccaagggcaggacccatcctgagatcgaccgcgaggtggtgcgcaggctgcgcgagttctaccggcctttcaacctcaagttctaccagatgaccgggcacgactttggctgggattgagcagacccgggctatgtaccttacccacgtggcttatctattgacagagattatatgtatgtaaaatgtacagaaatctattttataataatttatttttaattcataagcaattaattcactaagctgcctagccacactctttagagagttagcttcataatctgttaacattccaaagtgtttaactctagtatttcgttctcttcttcacaattgatggtgcttctattttttcttctcccctacctgttatatttaaaacaaagaaaagcacaacttgagatttttgttgttacgggtattcagccttcagtcaccgtctgagttctccagttgctgcctccttgtcttgtcttgggtctcccattccagcttccctgtctcttcctgcctgtgtacctcgtaggaacgctgagctgcctcaacagggctgtattctgaagggcaggcctcatgcagcagcctccttgcagatgtggtgtcccgtccaatgatgtagcctgaaagccacagccctagggttctgtccctccctccattcagcacatggggaaatttctcactccctttacagggacatccacatcctttttttttcttttttttttttttttttttttgagatggagtcttgctcttgttgcccaggctggggcgtaatggtgtgatatatgcttaccacaacctctggctcccggttcaagcgattctcctgtctcagcctcccaagtatctgggattacaggcatgcaccaccatgcctggctaattttgtatttttagtagagacggggtttcttcatgttggtcaggctggtatcaaactcccgacctcaggtgatccgcctgccttggcctccaaagtgttgggattataggcgtgagccactgcgcccgctatccacatccttctagagtcagaatggtagggtctgttgacttcagcttttgattttgcaggatggccctgtgtcctcctctgccccattccctggttcattaaccagtttgaagtgtatgtagattgttgccccgtctttcccaggtcacatgtgtgagatgcctgggtgctgcttcagaaatcaagatgatctcctttaatttgcatgaaactacaccatgctgcgttccccaggcagacagttctgctttgacacaccaaagaatcccgtaggctagcagagccaccagcacaaaccaagggcgctgggtgtcgagactcagaggggtcagctgtgtccctcggcatcagcgtctaccaaggtgctgctaggtacagagccagccagtgttgggcagcaggctcacagcctcaatagggagaaaagacaaaggcctcaaaatgacaggcagcctgacagaggaaggagtctgacacctcagcttgatgcgtctttggaattcctagctcatctcagaattatatcttagagtgataatatgggtggtagccagtggccaaacagcaagaactaagagtggcccttgcaaaaaaaggttgggaaagctgggcccatattgcctgtaaacccttgagcctgatgctcatacagctgtcccttgttttagccaggtcttgacagaagggttaccagcactgtcactgctctacagaatgctctccccgtgcctctctgttgatttataacagttgggtaaccagatagcaatatagtggcaattgagtagccatatagtaatacaggggcagttggttaaacatatagcaatatcacataatgatatgtttaatttaacctcagttttttaaaccagaatgcttctaccataaaagaattgtgatttcagttatacttccatcaaggaatatgtgggaagatatacatattgtcaaaatggttgggatgggatagttacaaaggacacttttgtatgttgtatgggatcacttgcctgatagtataaggaacattgtatgaaaagatgaaaagatacttcatttttagaaactgatcagagatgtcactggtctttaagtgatgtcttgaaaatccagtatgtatttgcccaaaagttttagcctacatctagctagcttacacttagcagccaaaccatcattgtgtaggttctgttttggaggaagctcatgggggatctgtgtatttcttaggtttctccctgttctccaatgttttatccatttcgtagcttttttactgtctccagaaagtagtgtgggacctgcacttaggggaataccagaatcatagcgtggttctgccttcttgatgagtgattgtgaaaaacacctgcataagggtgctaattggttgtgtattttttcatttatttgaaatcaaactgagaacacctcttttcggtttacagcataacatggcttgaagtaaaaggcagtatccaagtccttcacctggtcttgccctgtctactttctgatcattctgatggtctgatgtggctgttgatgtggaactgcagaagagttcagagaagagtatgcaacaaagccataggaaaacacacaggagcttttccctccccttcaggtccccgccctctttccaagctggacaattttttattaagttgtttattccctgccttaaaactgaaacaggaaattttctggtagaaggagggtcatttagtcacgaacactgaagtgggtcaaaattctattctgggtcaaatccttgaattcaaacagatgtccataatcagtactgatggaatagagcaagtttttctatgtaagacaaataaatcaaacatcatgtgcatctcctcataagggtctgcaagggtctgatggtttaaagttcctaacagatctggttgcagcatctgccggagcttgcaccccatcatcggacggtcatcttcctgctgcagaagttaggtaacataagacttagatttcttcctgttctagcaatctgcaagaccaccaggcttaactttttagctgccagaagacaaacccccttttctgtttcggcaatttgtcctggcacgtgttttggacttcctccgatttacacgaaaagctctgatattcattggagtactttattttttttcctcagttttgtttcttttctcatgtaaaaacaaacaaaaaggtcaacaaaaaaaaattgaggtttttcttgtttctatctagttcatgctttctttgcggtgtttgaacagtagtctgttaacttagtaggtggtacctggaaaggtattttaagtatagtgactgtttaataaatacttaattggatgatggaggaggagaaattgttttcttcccaggattctctttgggggtcattttgtgtgacagatatattttagacatttggagaaacagtttcagatcctgccaggatatttttgtaaaaaaggaaaatggaagattccaataaactagaaacagtacgtatctaagatgctgacacagaagctaatgtgacttttcagcttatcaagaggatggccaataaaacttaaaggtgtggttagatgttttctcacttttgtgacattaatttatcactgagtctcattcaaccaagtaatctaaaatactgtgcaaattctagcagtatgtcttcgataacttggatgttaggatagccaatatgtacaaaaaattaaatcaagtattttgtcctatgtataacacaaattaattttacacagagaaagatgtttctaggcaagtgaaattctggtaattcatactatttctttgtatgaacaaataaaatatattttgcc

SEQ ID NO: 1928 - protein, 390 aa, Homo sapiens; identical to SEQ ID NO: 1926

SEQ ID NO: 1929 - DNA, 1659 bp, Homo sapiens
atgtcgcccagggtagtctcaaactcctcggtcttggcctcccaaagtgttgggattacaaacgtgagaaccgtattttcaaatgtattcaataacactacagcgtttccaattttaagaggaagcaattgccacaaaatcactgcccctggtctgggcaaggggcagttggtgaacttgctgcctccagagaaccttccctggtgtggaggcagccagggacccaggatgctccggacctgttacgtgctctgttcccaagctggtcccccctccaggggctggcagtccctgagctttgatggcggggccttccaccttaagggcacaggagagctgacacgggccttgctggttctccggctgtgtgcctggcccccactcgtcactcacgggctgttgctccaggcctggtctcggcgactcctgggctcccggctctcaggcgcatttctccgagcatccgtctatgggcagtttgtggctggtgagacagcagaggaggtgaagggctgcgtgcagcagctgcggaccctcagcctccgaccactgctggcagtgcccactgaggaggagccggactctgctgccaagagtggtgaggcgtggtatgaggggaacctcggtgctatgctgcggtgtgtggacctgtcacggggcctcctggagccccccagcctggctgaggccagcctcatgcagctgaaggtgacggcgctgaccagtactcggctctgtaaggagctagcctcgtgggtcagaaggccaggagcctccttggagctgagccccgagaggctggctgaagctatggactctgggcagaacctccaggtctcctgcctcaatgctgagcagaaccagcacctccgggcctccctcagccgcctgcatcgggtggcacagtatgcccgggcccagcacgtgcggctcctggtggatgcggagtacacctcactgaaccctgcgctctcgctgctggtggctgccctggctgtgcgctggaacagcccgggtgaaggcgggccctgggtgtggaacacctaccaggcctgtctaaaggacacattcgagcggctggggagggatgcagaggctgcgcacagggccggcctggccttcggagtgaagctggtacgaggtgcatatctggacaaggagagagcggtggcccagctccatgggatggaagaccccactcagcctgactatgaggccaccagtcagagttacagccgctgcctggaactgatgctgacgcacgtggcccgccatggccccatgtgccacctcatggtggcttcccacaatgaggaatctgttcgccaggcaaccaagcgcatgtgggagctgggcattcctctggatgggactgtctgtttcggacaacttctgggcatgtgtgaccacgtctctctagcactggggcaggccggctatgtagtgtataagtccattccctatggctccttggaggaggtaatcccctacctgatccggagggcccaggagaaccggagcgtgcttcagggtgcccgcagggaacaggagctgctcagccaagaactgtggcggcggctgctgccaggatgccgaaggataccccactagcacccctgagggggtcatgtggtcaataaaagtccttaggtgctgcct

SEQ ID NO: 1930 - protein, 536 aa, Homo sapiens
MSPRVVSNSSVLASQSVGITNVRTVFSNVFNNTTAFPILRGSNCHKITAPGLGKGQLVNLLPPENLPWCGGSQGPRMLRTCYVLCSQAGPPSRGWQSLSFDGGAFHLKGTGELTRALLVLRLCAWPPLVTHGLLLQAWSRRLLGSRLSGAFLRASVYGQFVAGETAEEVKGCVQQLRTLSLRPLLAVPTEEEPDSAAKSGEAWYEGNLGAMLRCVDLSRGLLEPPSLAEASLMQLKVTALTSTRLCKELASWVRRPGASLELSPERLAEAMDSGQNLQVSCLNAEQNQHLRASLSRLHRVAQYARAQHVRLLVDAEYTSLNPALSLLVAALAVRWNSPGEGGPWVWNTYQACLKDTFERLGRDAEAAHRAGLAFGVKLVRGAYLDKERAVAQLHGMEDPTQPDYEATSQSYSRCLELMLTHVARHGPMCHLMVASHNEESVRQATKRMWELGIPLDGTVCFGQLLGMCDHVSLALGQAGYVVYKSIPYGSLEEVIPYLIRRAQENRSVLQGARREQELLSQELWRRLLPGCRRIPH

SEQ ID NO: 1931 - DNA, 2538 bp, Homo sapiens
ccctcggggctgcccctgctgcctgtgctgttcgctcttggggggcttctgctcctctccaatgcctcctgtgtcgggggggtcctctggcagcggagactcaggcgtcttgctgaggcactcaacttccccccacaccttcatcctggaaggtcggaagaggaccgagtcaggaacgaatatgaggagagccagtggacaggagagcgggacactcagagctccacggtcagcacaacagaggcagagccgtattaccgctccctgagggacttcagcccccagctgcccccgacgcaggaggaggtgtcttattcccgaggtttcacaggtgaagatgaggatatggccttccctgggcacttgtatgatgaggtagaaagaacgtaccccccgtctggagcctggggacccctctacgatgaagtgcagatgggaccctgggacctccactggcctgaagacacatatcaggatccaagaggaatctatgaccaggtggccggagacttggacactctggaacccgattctctgcccttcgagctgaggggacatctggtatggggtttcaaccatgttagccaggctggtctcaaactcctggcctcaagtgatccacccgcctcagcctcccaaagtgctgagattacagagtctcactctgtagtccaggttggagtgcagtggcgttatttcggctcactgcatcctctgcctcctggttcaagagattctcttgcctcagcctcccgcatagctgggattacagcaccttgggaggcagaggtgagcagatcacctcagggcactcaggattccccagtgaccaggtctggtcccccctccaggggctggcagtccctgagctttgatggcggggccttccaccttaagggcacaggagagctgacacgggccttgctggttctccggctgtgtgcctggcccccactcgtcactcacgggctgttgctccaggcctggtctcggcgactcctgggctcccggctctcaggcgcatttctccgagcatccgtctatgggcagtttgtggctggtgagacagcagaggaggtgaagggctgcgtgcagcagctgcggaccctcagcctccgaccactgctggcagtgcccactgaggaggagccggactctgctgccaagaggatgaggcttcaccatgttggccaggctggtcttgaactcctgaccccagcggcatctggctctgttgcccaggctggagtgcagtggagacaatcctctgacaggggaggaggaaaccaggctgctgcctccaggtcttcccttctccaggaggcagcattctccccaccatgcggaaggttgcagcttccagcccaacctgcctccagacacggtgctaggggccgaggaagcatgaaggcaaaatccctgacctcgaggcacttacttgcaagtcaggggcaagagacaataattaaaaccaaagtcagaatcccagcactttggaaggctgagcctgggcaacacagcaagaccccgtctcagcaaaacaaaagtcagtacgtaacaacactttgggaggccgatgtgggcagatcacttgagaacctccaggtctcctgcctcaatgctgagcagaaccagcacctccgggcctccctcagccgcctgcatcgggtggcacaggtaacccctcctgctggaaccagcacctccgggcctccctctgccgcctgcattgggtggcacagccgcctgcatcgggtggcacagtatgcccgggcccagcacgtgcggctcctggtggatgcggagtacacctcactgaaccctgcgctctcgctgctggtggctgccctggctgtgcgctggaacagcccgggtgaaggcgggccctgggtgtggaacacctaccaggcctgtctaaaggacacattcgagcggctggggagggatgcagaggctgcgcacagggccggcctggccttcggagtgaagctggtacgaggtgcatatctggacaaggagagagcggtggcccagctccatgggatggaagaccccactcagcctgactatgaggccaccagtgagctgaacagagcatctcccttcagttacagccgctgcctggaactgatgctgacgcacgtggcccgccatggccccatgtgccacctcatggtggcttcccacaatgaggaatctgttcgccaggcaaccaagcgcatgtgggagctgggcattcctctggatgggactgtctgtttcggacaacttctgggcatgtgtgaccacgtctctctagcactggggcaggccggctatgtagtgtataagtccattccctatggctccttggaggaggtaatcccctacctgatccggagggcccaggagaaccggagcgtgcttcagggtgcccgcagggaacaggagctgctcagccaagaactgtggcggcggctgctgccaggatgccgaaggataccccactagcacccctgagggggtcatgtggtcaataaaagtccttaggtgctgcct

SEQ ID NO: 1932 - protein, 829 aa, Homo sapiens [sequence omitted]

SEQ ID NO: 1933 - DNA, 4156 bp, Homo sapiens
atggccctggggacgacgctcagggcttctctcctgctcctggggctgctgactgaaggcctggcgcagttggcgattcctgcctccgttccccggggcttctgggccctgcctgaaaacctgacggtggtggagggggcctcagtggagctgcgttgtggggtcagcacccctggcagtgcggtgcaatgggccaaagatgggctgctcctgggccccgaccccaggatcccaggcttcccgaggtaccgcctggaaggggaccctgctagaggtgaattccacctgcacatcgaggcctgtgacctcagcgatgacgcggagtatgagtgccaggtcggccgctctgagatggggcccgagctcgtgtctcccagagtgatcctctccatcctggttcctcccaagctgctcctgctgaccccagaggcaggcaccatggtcacctgggtagctgggcaggagtacgtggtcaactgtgtgtctggggacgcgaagccagcacctgacatcaccattctcctgagtggacagacaatatctgacatctctgcaaacgtgaacgagggctcccagcagaaactcttcactgtggaggccacagccagggtgacaccccggagctcagataataggcagttgctggtctgtgaggcgtctagcccagcactggaggcccccatcaaggcctcattcaccgtgaatgttctgttccctccaggaccccctgtcatcgagtggccaggcctggatgaggggcacgtgcgggcaggacagagcttggagctgccgtgcgtggcccgagggggtaatcccttagccacactgcagtggctgaagaatggccagccggtgtccacagcgtggggcacagagcacacccaggcggtggcccgcagtgtgctggtgatgaccgtgaggccagaagaccatggagcgcagctcagctgcgaggcccacaacagcgtgtctgcagggacccaggagcacggcatcacactgcaggtcacctttccccctagtgccattattatcttgggatctgcatcccagactgagaacaagaacgtgacactctcctgtgtcagcaagtccagtcgcccgcgggttctgctacgatggtggctgggctggcggcagctgctgcccatggaggagacagtcatggatggactgcatggcggtcacatctccatgtccaacctgacattcctggcgcggcgggaggacaacggtctgaccctcacatgtgaggccttcagtgaagccttcaccaaggagaccttcaagaagtcgctcatcctgaacgtaaaatatcccgcccagaaactgtggattgagggtcccccagagggccagaagctccgggctgggacccgggtgaggctggtgtgtttggctatcgggggcaacccagagccctccctcatgtggtacaaggactcgcgcaccgtgaccgagtcgcggctgccgcaggagtcgcggcgcgtgcatctcggcagcgtggagaaatctgggagcaccttctcccgagagctggtgctggtcacagggccgtcggacaaccaggccaagttcacgtgcaaggctggacagctcagcgcgtccacgcagctggcggtgcagtttcccccaactaacgtgacgatcctggccaacgcatccgcactgcgcccgggagacgccttaaacttgacatgcgtcagcgtcagcagcaatccgccggtcaacttgtcctgggacaaggaaggggagaggctggagggcgtggccgccccaccccggagagccccattcaaaggctccgccgccgccaggagcgtccttctgcaagtgtcatcccgcgatcatggccagcgcgtgacctgccgcgcccacagcgccgagctccgcgaaaccgtgagctccttctatcgcctcaacgtactgtaccgtccagagttcctgggggagcaggtgctggtggtgaccgcggtggagcagggcgaggcgttgctgcccgtgtccgtgtccgctaaccccgcccccgaggccttcaactggaccttccgcggctatcgcctcagtccagcgggcggcccccggcatcgcatcctgtccagcggggctctgcatctgtggaatgtgacccgcgcggacgacggcctctatcagctgcactgccagaactctgagggcaccgcggaagcgcggctgcggctggacgtgcactatgctcccaccatccgtgccctccaggaccccactgaggtgaacgtcgggggttctgtggacatagtctgcactgtcgatgccaatcccatcctcccgggcatgttcaactgggagagactgggagaagatgaggaggaccagagcctggatgacatggagaagatatccaggggaccaacggggcgcctgcggattcaccatgccaaactggcccaggctggcgcttaccagtgcattgtggacaatggggtggcgcctccagcacgacggctgctccgtcttgttgtcagatttgccccccaggtggagcaccccactcccctaactaaggtggctgcagctggagacagcaccagttctgccaccctccactgccgtgcccgaggtgtccccaacatcgttttcacttggacaaaaaacggggtccctctggatctccaagatcccaggtacacggagcacacataccaccagggtggtgtccacagcagcctcctgaccattgccaacgtgtctgccgcccaggattacgccctcttcacatgtacagccaccaacgcccttggctcggaccaaaccaacattcaacttgtcagcatcagccgccctgaccctccatcaggattaaaggttgtgagtctgaccccacactccgtggggctggagtggaagcctggctttgatgggggcctgccacagaggttctgcatcaggtatgaggccctggggactccagggttccactatgtggatgtcgtaccaccccaggccaccaccttcacgctgactggtctacagccttctacaagatacagggtctggctgctggccagtaatgccttgggggacagtggactggctgacaaagggacccagcttcccatcactaccccaggtctccaccagccttctggagaacctgaagaccagctgcccacagagccaccttcaggcaagtcctcaaagacagaggcagggtcggaagaggaccgagtcaggaacgaatatgaggagagccagtggacaggagagcgggacactcagagctccacggtcagcacaacagaggcagagccgtattaccgctccctgagggacttcagcccccagctgcccccgacgcaggaggaggtgtcttattcccgaggtttcacaggtgaagatgaggatatggccttccctgggcacttgtatgatgaggtagaaagaacgtaccccccgtctggagcctggggacccctctacgatgaagtgcagatgggaccctgggacctccactggcctgaagacacatatcaggatccaagaggaatctatgaccaggtggccggagacttggacactctggaacccgattctctgcccttcgagctgaggggacatctggtgtaagagccctctcaaccccattgtcctgcacctgcaggaatttacactccactggtctctctcattacagcctgggccgagctggttaggtgagctccataaaacccaaagggacttggtgtcaggagaggacatggagggggctgagtgacagagatggttcagctggtaccagagtagaaacaaggtgcatcctggggttggctttagaaactaaacttctccaaaaggacagggcagattgtaaacgtcgtctcaaaaatgaaatgctgccgggtgcggtgactcacgcctataatcccagcactttgggaggctgaggcgggtggatcacctgaggtcaggagttcgagaccagcctggccaacatggtaaaactccatttctactaaaaatataaaaaattagccaggagtagtggcgcatgcctgtagtcccagctacttgggaggctgatgcatgagaattgcttgaacccaggaggcggaggttgcagtgagctgagatcacgccactgcactccagcctgggcgacagagcgagattctgtctc

SEQ ID NO: 1934 - protein, 1201 aa, Homo sapiens
MALGTTLRASLLLLGLLTEGLAQLAIPASVPRGFWALPENLTVVEGASVELRCGVSTPGSAVQWAKDGLLLGPDPRIPGFPRYRLEGDPARGEFHLHIEACDLSDDAEYECQVGRSEMGPELVSPRVILSILVPPKLLLLTPEAGTMVTWVAGQEYVVNCVSGDAKPAPDITILLSGQTISDISANVNEGSQQKLFTVEATARVTPRSSDNRQLLVCEASSPALEAPIKASFTVNVLFPPGPPVIEWPGLDEGHVRAGQSLELPCVARGGNPLATLQWLKNGQPVSTAWGTEHTQAVARSVLVMTVRPEDHGAQLSCEAHNSVSAGTQEHGITLQVTFPPSAIIILGSASQTENKNVTLSCVSKSSRPRVLLRWWLGWRQLLPMEETVMDGLHGGHISMSNLTFLARREDNGLTLTCEAFSEAFTKETFKKSLILNVKYPAQKLWIEGPPEGQKLRAGTRVRLVCLAIGGNPEPSLMWYKDSRTVTESRLPQESRRVHLGSVEKSGSTFSRELVLVTGPSDNQAKFTCKAGQLSASTQLAVQFPPTNVTILANASALRPGDALNLTCVSVSSNPPVNLSWDKEGERLEGVAAPPRRAPFKGSAAARSVLLQVSSRDHGQRVTCRAHSAELRETVSSFYRLNVLYRPEFLGEQVLVVTAVEQGEALLPVSVSANPAPEAFNWTFRGYRLSPAGGPRHRILSSGALHLWNVTRADDGLYQLHCQNSEGTAEARLRLDVHYAPTIRALQDPTEVNVGGSVDIVCTVDANPILPGMFNWERLGEDEEDQSLDDMEKISRGPTGRLRIHHAKLAQAGAYQCIVDNGVAPPARRLLRLVVRFAPQVEHPTPLTKVAAAGDSTSSATLHCRARGVPNIVFTWTKNGVPLDLQDPRYTEHTYHQGGVHSSLLTIANVSAAQDYALFTCTATNALGSDQTNIQLVSISRPDPPSGLKVVSLTPHSVGLEWKPGFDGGLPQRFCIRYEALGTPGFHYVDVVPPQATTFTLTGLQPSTRYRVWLLASNALGDSGLADKGTQLPITTPGLHQPSGEPEDQLPTEPPSGKSSKTEAGSEEDRVRNEYEESQWTGERDTQSSTVSTTEAEPYYRSLRDFSPQLPPTQEEVSYSRGFTGEDEDMAFPGHLYDEVERTYPPSGAWGPLYDEVQMGPWDLHWPEDTYQDPRGIYDQVAGDLDTLEPDSLPFELRGHLV

SEQ ID NO: 1935 - DNA, 3583 bp, Homo sapiens
aactttaattgccaagatttcacccctcctcctcaagcccagattatttatcctccctccggcctgggctgctggatgcagcagcggctgggcttggtcccaggagcagggagagtgcgctcccggccctcctagccgcgtgcccgggccatggtgcggctgagccccgcgcttgggtgaggcggcggcgcggctcggagcccggcggaccggtcctacgggacatcttcccctgaggaggagtcttcccctggggctgcgtgccgggggcgagcggcggccgcgatgttcagctggctgggtacggacgaccgccggaggaaggaccccgaggttttccagacggtgagtgaggggctcaagaaactctacaagagcaagctgctgcccttggaagagcattaccgcttccacgagttccactcgcccgccctggaggatgccgacttcgacaacaagcccatggttctgctggtgggccagtactccactgggaagaccaccttcatcaggtacctgctggaacaggacttcccaggcatgaggattgggcctgagcccaccacagactccttcattgcggtgatgcagggagacatggaggggatcatccctgggaacgccctggtggtggatcccaagaaacccttcaggaaactcaacgcctttggcaacgccttcttgaacaggttcgtgtgtgcccagctacctaaccctgtgctggagagcatcagcgtcatcgacacaccagggatcctctctggggagaagcagaggatcagccgggggtatgactttgcagctgtccttgagtggtttgccgagcgggttgaccgcatcattctgctcttcgatgcccacaaactggacatctctgatgagttctcagaagtcatcaaagccctcaagaaccacgaggacaagatgcgagtggtgctgaacaaagctgaccagatcgagacgcagcagctgatgcgggtgtacggggccctcatgtggtccttggggaagatcgtgaacaccccagaggtgatccgggtctacatcggctccttctggtcccaccccctcctcatccctgacaaccggaagctctttgaggctgaggaacaggacctattcagggacatccagagtctgccccgaaatgctgccctgcgcaagctcaacgacctcatcaaaagggccaggctggccaaggtccacgcctacatcatcagctctctgaagaaggagatgccctcggtgttcgggaaggacaacaagaagaaggagctggtcaacaacctggccgagatctatggccggatcgagcgggagcaccagatctcacctggggacttccccaatctgaagaggatgcaggaccagctgcaggcccaggactttagcaagttccagccgctgaagagcaagctgctggaggtagtggacgacatgctggcccatgacattgcccagctcatggtgctagtgcgccaggaggagtcacagcggcccatccagatggtgaagggcggagcgttcgagggcaccctgcacggcccctttgggcatggctatggggagggggctggagaaggtatcgatgatgctgagtgggtggtggccagggacaagcccatgtacgacgagatcttctacaccctgtcaccggtggatggcaagatcacaggcgctaatgccaagaaggagatggtgcgctccaagctgcccaacagtgtgctgggcaagatctggaagctggccgacattgacaaggatggcatgctggacgacgacgagtttgcactggccaaccacctcatcaaagtcaagctggaggggcacgagctgcccaacgagctgcctgcccacctcctgcccccgtccaagaggaaagttgccgagtgatggggtggggggacattcagacgggcagtgttagaggaggagatgggagcggtgactacacacacacacacacacacacacacacacacaaacatgcacacacacatatgcatatcttgacattgctctgtaggtgagagaggaccatgacgcccatgtttgcagctgatacttgtttgggcacacctccaagttctcgggattagaaggacaagagcactcccaggccccagagtctaagcctaagtctctatcgctcttcccctctcctcggccactccccagataccagacctgaggcaattcacttgccagcacagatggccaacccacctccagattccccagtgcttccacacccgggctctgagcaaatggaaaagacttttcatttagtagacaattcacttctttttctgtgcttcccctatctgctttggcttcctaataagaaatccattcaagagctaggagatctgagggcaggcgggcagctgcagggaggagaggtgagaaaggaagcgtcttctagagacattggcccaggagctctgttctttcctaatctaagcctctgtcttcttcggcaaaccttgctttgaactctgccagtatttcattttaaagaatcccagagcgggagagagaagagaaaaaaattgataagagtgaggaaattgtcctgtagtctattgaaaaccagtcaaggtggttttagttcatagattttgttagatgttctttccacctggcctatgatgtttagatgttcatacttgactcacatttacccagcccctcctgcgtaccaggagctgtgttaggcactttatatacattattctatgtggccctcactgatgccccagggaagtatgcattagccttcccattttgcagttgaggaggctgagtagcctcagaagggtttaggcgaccttctgaaactcacagaagtcacgtgatggagagaggattcaaagccagggcctcagaccctcacacacttgtctgtgctatgatgtatgcaggatcccagcattgatacccaatgacaaactatggagaacaagcaaagtatgcaggccccctgcagcctcccaggacaggctggcaagggaggagggccggccagcatttggtggcccatcagtctggccatctgtcacgtcacagaagcaaaccgtgccttctggctctgcgccccatattcccagcatcatagacatccaacagcaccagcaggagagtgggctagcctgctggatgctgttcgtgcctgtccctgctctgcctcccacccagttgcctgaatcatcccagctcagatgcagccactgtctcttgtcaagtgggacctcatactattctcagaaggctaacttgagaggtttggggccttgttccccagagggtccccagggactctgcagtgtccttggcaaatccccactgtactcaatgccctacattctcttctgtggtctctcccctggcttgcttcatggccactgaaccaatcactttgtatgctatgctcctactgtgatggaaaacaaaatgagtataacttattttatatccatattcagactatatagagaatattctatgcatctatgacgtgcttactactgcagtgcatttgtcattagtcttcatgttaatacagtacatttattctttggta

SEQ ID NO: 1936 - protein, 535 aa, Homo sapiens
MFSWLGTDDRRRKDPEVFQTVSEGLKKLYKSKLLPLEEHYRFHEFHSPALEDADFDNKPMVLLVGQYSTGKTTFIRYLLEQDFPGMRIGPEPTTDSFIAVMQGDMEGIIPGNALVVDPKKPFRKLNAFGNAFLNRFVCAQLPNPVLESISVIDTPGILSGEKQRISRGYDFAAVLEWFAERVDRIILLFDAHKLDISDEFSEVIKALKNHEDKMRVVLNKADQIETQQLMRVYGALMWSLGKIVNTPEVIRVYIGSFWSHPLLIPDNRKLFEAEEQDLFRDIQSLPRNAALRKLNDLIKRARLAKVHAYIISSLKKEMPSVFGKDNKKKELVNNLAEIYGRIEREHQISPGDFPNLKRMQDQLQAQDFSKFQPLKSKLLEVVDDMLAHDIAQLMVLVRQEESQRPIQMVKGGAFEGTLHGPFGHGYGEGAGEGIDDAEWVVARDKPMYDEIFYTLSPVDGKITGANAKKEMVRSKLPNSVLGKIWKLADIDKDGMLDDDEFALANHLIKVKLEGHELPNELPAHLLPPSKRKVAE

SEQ ID NO: 1937 - DNA, 3579 bp, Homo sapiens
aactttaattgccaagatttcacccctcctcctcaagcccagattatttatcctccctccggcctgggctgctggatgcagcagcggctgggcttggtcccaggagcagggagagtgcgctcccggccctcctagccgcgtgcccgggccatggtgcggctgagccccgcgcttgggtgaggcggcggcgcggctcggagcccggcggaccggtcctacgggacatcttcccctgaggaggagtcttcccctggggctgcgtgccgggggcgagcggcggccgcgatgttcagctggctgggtacggacgaccgccggaggaaggaccccgaggttttccagacggtgagtgaggggctcaagaaactctacaagagcaagctgctgcccttggaagagcattaccgcttccacgagttccactcgcccgccctggaggatgccgacttcgacaacaagcccatggttctgctggtgggccagtactccactgggaagaccaccttcatcaggtacctgctggaacaggacttcccaggcatgaggattgggcctgagcccaccacagactccttcattgcggtgatgcagggagacatggaggggatcatccctgggaacgccctggtggtggatcccaagaaacccttcaggaaactcaacgcctttggcaacgccttcttgaacaggttcgtgtgtgcccagctacctaaccctgtgctggagagcatcagcgtcatcgacacaccagggatcctctctggggagaagcagaggatcagccgggggtatgactttgcagctgtccttgagtggtttgccgagcgggttgaccgcatcattctgctcttcgatgcccacaaactggacatctctgatgagttctcagaagtcatcaaagccctcaagaaccacgaggacaagatgcgagtggtgctgaacaaagctgaccagatcgagacgcagcagctgatgcgggtgtacggggccctcatgtggtccttggggaagatcgtgaacaccccagaggtgatccgggtctacatcggctccttctggtcccaccccctcctcatccctgacaaccggaagctctttgaggctgaggaacaggacctattcagggacatccagagtctgccccgaaatgctgccctgcgcaagctcaacgacctcatcaaaagggccaggctggccaaggtccacgcctacatcatcagctctctgaagaaggagatgccctcggtgttcgggaaggacaacaagaagaaggagctggtcaacaacctggccgagatctatggccggatcgagcgggagcaccagatctcacctggggacttccccaatctgaagaggatgcaggaccagctgcaggcccaggactttagcaagttccagccgctgaagagcaagctgctggaggtagtggacgacatgctggcccatgacattgcccagctcatggtgctagtgcgccaggaggagtcacagcggcccatccagatggtgaagggcggagcgttcgagggcaccctgcacggcccctttgggcatggctatggggagggggctggagaaggtatcgatgatgctgagtgggtggtggccagggacaagcccatgtacgacgagatcttctacaccctgtcaccggtggatggcaagatcacaggcgctaatgccaagaaggagatggtgcgctccaagctgcccaacagtgtgctgggcaagatctggaagctggccgacattgacaaggatggcatgctggacgacgacgagtttgcactggccaaccacctcatcaaagtcaagctggaggggcacgagccaacgagctgcctgcccacctcctgcccccgtccaagaggaaagttgccgagtgatggggtggggggacattcagacgggcagtgttagaggaggagatgggagcggtgactacacacacacacacacacacacacacacacacaaacatgcacacacacatatgcatatcttgacattgctctgtaggtgagagaggaccatgacgcccatgtttgcagctgatacttgtttgggcacacctccaagttctcgggattagaaggacaagagcactcccaggccccagagtctaagcctaagtctctatcgctcttcccctctcctcggccactccccagataccagacctgaggcaattcacttgccagcacagatggccaacccacctccagattccccagtgcttccacacccgggctctgagcaaatggaaaagacttttcatttagtagacaattcacttctttttctgtgcttcccctatctgctttggcttcctaataagaaatccattcaagagctaggagatctgagggcaggcgggcagctgcagggaggagaggtgagaaaggaagcgtcttctagagacattggcccaggagctctgttctttcctaatctaagcctctgtcttcttcggcaaaccttgctttgaactctgccagtatttcattttaaagaatcccagagcgggagagagaagagaaaaaaattgataagagtgaggaaattgtcctgtagtctattgaaaaccagtcaaggtggttttagttcatagattttgttagatgttctttccacctggcctatgatgtttagatgttcatacttgactcacatttacccagcccctcctgcgtaccaggagctgtgttaggcactttatatacattattctatgtggccctcactgatgccccagggaagtatgcattagccttcccattttgcagttgaggaggctgagtagcctcagaagggtttaggcgaccttctgaaactcacagaagtcacgtgatggagagaggattcaaagccagggcctcagaccctcacacacttgtctgtgctatgatgtatgcaggatcccagcattgatacccaatgacaaactatggagaacaagcaaagtatgcaggccccctgcagcctcccaggacaggctggcaagggaggagggccggccagcatttggtggcccatcagtctggccatctgtcacgtcacagaagcaaaccgtgccttctggctctgcgccccatattcccagcatcatagacatccaacagcaccagcaggagagtgggctagcctgctggatgctgttcgtgcctgtccctgctctgcctcccacccagttgcctgaatcatcccagctcagatgcagccactgtctcttgtcaagtgggacctcatactattctcagaaggctaacttgagaggtttggggccttgttccccagagggtccccagggactctgcagtgtccttggcaaatccccactgtactcaatgccctacattctcttctgtggtctctcccctggcttgcttcatggccactgaaccaatcactttgtatgctatgctcctactgtgatggaaaacaaaatgagtataacttattttatatccatattcagactatatagagaatattctatgcatctatgacgtgcttactactgcagtgcatttgtcattagtcttcatgttaatacagtacatttattctttggta

SEQ ID NO: 1938 - protein, 545 aa, Homo sapiens
MFSWLGTDDRRRKDPEVFQTVSEGLKKLYKSKLLPLEEHYRFHEFHSPALEDADFDNKPMVLLVGQYSTGKTTFIRYLLEQDFPGMRIGPEPTTDSFIAVMQGDMEGIIPGNALVVDPKKPFRKLNAFGNAFLNRFVCAQLPNPVLESISVIDTPGILSGEKQRISRGYDFAAVLEWFAERVDRIILLFDAHKLDISDEFSEVIKALKNHEDKMRVVLNKADQIETQQLMRVYGALMWSLGKIVNTPEVIRVYIGSFWSHPLLIPDNRKLFEAEEQDLFRDIQSLPRNAALRKLNDLIKRARLAKVHAYIISSLKKEMPSVFGKDNKKKELVNNLAEIYGRIEREHQISPGDFPNLKRMQDQLQAQDFSKFQPLKSKLLEVVDDMLAHDIAQLMVLVRQEESQRPIQMVKGGAFEGTLHGPFGHGYGEGAGEGIDDAEWVVARDKPMYDEIFYTLSPVDGKITGANAKKEMVRSKLPNSVLGKIWKLADIDKDGMLDDDEFALANHLIKVKLEGHEPTSCLPTSCPRPRGKLPSDGVGGHSDGQC

SEQ ID NO: 1939 - DNA, 6237 bp, Homo sapiens
tagtctctttggaaacttctgcaggggaaaagagctaggaaagagctgcaaagcagtgtgggctttttcccttttttgctccttttcattacccctcctccgttttcacccttctccggacttcgcgtagaacctgcgaatttcgaagaggaggtggcaaagtgggagaaaagaggtgttagggtttggggtttttttgtttttgtttttgttttttaatttcttgatttcaacattttctcccaccctctcggctgcagccaacgcctcttacctgttctgcggcgccgcgcaccgctggcagctgagggttagaaagcggggtgtattttagattttaagcaaaaattttaaagataaatccatttttctctcccacccccaacgccatctccactgcatccgatctcattatttcggtggttgcttgggggtgaacaattttgtggctttttttcccctataattctgacccgctcaggcttgagggtttctccggcctccgctcactgcgtgcacctggcgctgccctgcttcccccaacctgttgcaaggctttaattcttgcaactgggacctgctcgcaggcaccccagccctccacctctctctacatttttgcaagtgtctgggggagggcacctgctctacctgccagaaattttaaaacaaaaacaaaaacaaaaaaatctccgggggccctcttggcccctttatccctgcactctcgctctcctgccccaccccgaggtaaagggggcgactaagagaagatggtgttgctcaccgcggtcctcctgctgctggccgcctatgcggggccggcccagagcctgggctccttcgtgcactgcgagccctgcgacgagaaagccctctccatgtgcccccccagccccctgggctgcgagctggtcaaggagccgggctgcggctgctgcatgacctgcgccctggccgaggggcagtcgtgcggcgtctacaccgagcgctgcgcccaggggctgcgctgcctcccccggcaggacgaggagaagccgctgcacgccctgctgcacggccgcggggtttgcctcaacgaaaagagctaccgcgagcaagtcaagatcgagagagactcccgtgagcacgaggagcccaccacctctgagatggccgaggagacctactcccccaagatcttccggcccaaacacacccgcatctccgagctgaaggctgaagcagtgaagaaggaccgcagaaagaagctgacccagtccaagtttgtcgggggagccgagaacactgcccacccccggatcatctctgcacctgagatgagacaggagtctgagcagggcccctgccgcagacacatggaggcttccctgcaggagctcaaagccagcccacgcatggtgccccgtgctgtgtacctgcccaattgtgaccgcaaaggattctacaagagaaagcagtgcaaaccttcccgtggccgcaaacgtggcatctgctggtgcgtggacaagtacgggatgaagctgccaggcatggagtacgttgacggggactttcagtgccacaccttcgacagcagcaacgttgagtgatgcgtccccccccaacctttccctcaccccctcccacccccagccccgactccagccagcgcctccctccaccccaggacgccactcatttcatctcatttaagggaaaaatatatatctatctatttgaggaaactgaggacctcggaatctctagcaagggctcaacttcgaaaatggcaacaacagagatgcaaaaagctaaaaagacaccccccccctttaaatggttttctttttgaggcaagttggatgaacagagaagggaagagaggaagaacgagaggaagagaagggaaggaagtgtttgtgtagaagagagagaaagacgaatagagttaggaaaaggaagacaagcaggtgggcaggaaggacatgcaccgagaccaggcaggggcccaactttcacgtccagccctggcctggggtcgggagaggtgggcgctagaagatgcagcccaggatgtggcaatcaatgacactattggggtttcccaggatggattggtcagggggagaaaggaaaaggcaaaacactccaggacctctcccggatctgtctcctcctctagccagcagtatggacagctggacccctgaacttcctctcctcttacctgggcagagtgttgtctctccccaaatttataaaaactaaaatgcattccattcctctgaaagcaaaacaaattcataattgagtgatattaaatagagaggttttcggaagcagatctgtgaatatgaaatacatgtgcatatttcattccccaggcagacattttttagaaatcaatacatgccccaatattggaaagacttgttcttccacggtgactacagtacatgctgaagcgtgccgtttcagccctcatttaattcaatttgtaagtagcgcagcagcctctgtgggggaggataggctgaaaaaaaaaagtgggctcgtatttatctacaggactccatatagtcatatataggcatataaatctattctttttctttgtttttttctttcttcctttctttcaaaggtttgcattaacttttcaaagtagttcctataggggcattgaggagcttcctcattctgggaaaactgagaaaacccatattctcctaatacaacccgtaatagcatttttgcctgcctcgaggcagagtttcccgtgagcaataaactcagcttttttgtggggcacagtactggatttgacagtgattccccacgtgtgttcatctgcacccaccgagccaggcagaggccagccctccgtggtgcacacagcacgcgcctcagtccatcccattttagtctttaaaccctcaggaagtcacagtctccggacaccacaccacatgagcccaacaggtccacgatggatccaccagtcccaccccagccttttcctttcatctgaacagaatgtgcatttttggaagcctccctcactctccatgctggcagagcaggagggagactgaagtaagagatggcagagggagatggtggcaaaaaggtttagatgcaggagaacagtaagatggatggttccggccagagtcgatgtggggaggaacagagggctgaagggagagggggctgactgttccattctagctttggcacaaagcagcagaaagggggaaaagccaatagaaatttccttagcttccccaccatatgtattttctaggatttgagaggaaagagaggaaaatgggggaatgggttgcaaaatagaaatgagcttaatccaggccgcagagccagggaaggtgagtaactttaggagggtgctagactttagaagccagataggaagaatcagtctaaactggccatgctttggaagggacaagactatgtgctccgctgcccaccttcagcctgcaatgagggactgaggcccacgagtctttccagctcttcctccattctggccagtccctgcatcctccctggggtggaggatggaaggaaagctgggacaagcagggaacgcatgattcagggatgctgtcactcggcagccagattccgaaactcccattctccaatgacttcctcaaccaatgggtggccttgtgactgttctttaaggctgaagatatccaggaaagggggcttggacactggccaaggagaccccttcgtgctgtggacacagctctcttcactctttgctcatggcatgacacagcggagaccgcctccaacaacgaatttggggctacgaagaggaatagcgaaaaagcaaatctgtttcaactgatgggaaccctatagctatagaacttgggggctatctcctatgcccctggacaggacagttggctggggacaggagaagtgctcaatcttcatgagacaaaggggcccgatagggccagcagccacaaggccttgacctgccgagtcagcatgccccatctctctgcacagctgtcccctaaacccaactcacgtttctgtatgtcttaggccagtatcccaaacctcttccacgtcactgttctttccacccattctccctttgcatcttgagcagttatccaactaggatctgccaagtggatactggggtgccactcccctgagaaaagactgagccaggaactacaagctccccccacattcctcccagcctggacctaattcttgagaggggctctctcttcacggactgtgtctggactttgagcaggcttctgccccttgcgttggctctttgctgccagccatcaggtgggggattagagcctggtgtaagtgcgccagactcttccggtttccaaagttcgtgcctgcgaacccaaacctgtgagtctcttctgcatgcaggagtttctcctgggcagctggtcactccccagagaagctgggccttcatggacacatggaactaagcctcccaaatgggagttctggctgagcccagggtggggagatcctgggaagggaggcactggaggaagacggcacctcttcccccatggcagggtgtgagggaggcaggtttggaatggtgcgagtatggcaatctaagcaggggtctggtctctttgactccaggctggcctttggccgactgtctgctcacccagagaccttggactccggactatccatggctccgaatctaagtgctgcccactcccatgctcacacccacagaaggtcttcccatcccctttagattcgtgcctcactccaccagtgaggaagatgcctctgtctttcccacgactgccaggagatagggaagcccagccaggactgaccctccttcctccagcctgccctgacccacctggcaaagcagggcacatggggaggaagagactggaacctttctttgacagccaggcctagacagacaggcctggggacactggccccatgaggggaggaaggcaggcgcacgaggtccagggaggcccttttctgatcatgccccttctctcccaccccatctccccaccaccacctctgtggcctccatggtacccccacagggctggcctcccctagagggtgggcctcaaccacctgctcccgccacgcaccggttagtgagacagggctgccacggcaaccgccaagcccccctcaaggtgggacagtaccccggacccatccactcactcctgagagggctccggcccagaatgggaacctcagagaagagctctaaggagaagaaaccccatagcgtcagagaggatatgtctggcttccaagagaaaggaggctccgttttgcaaagtggaggagggacgagggacaggggtttcaccagccagcaacctgggccttgtactgtctgtgtttttaaaaccactaaagtgcaagaattacattgcactgtttctccactttttattttctcttaggcttttgtttctatttcaaacatactttcttggttttctaatggagtatatagtttagtcatttcacagactctggcctcctctcctgaaatccttttggatggggaaagggaaggtggggagggtccgaggggaaggggaccccagcttccctgtgcccgctcaccccactccaccagtccccggtcgccagccggagtctcctctctaccgccactgtcacaccgtagcccacatggatagcacagttgtcagacaagattccttcagattccgagttgcctaccggttgttttcgttgttgttgttgttgtttttctttttctttttttttttgaagacagcaataaccacagtacatattactgtagttctctatagttttacatacattcataccataactctgttctctcctcttttttgttttcaactttaaaaacaaaaataaacgatgataatctttactggtgaaaaggatggaaaaataaatcaacaaatgcaaccagtttgtgagaaaaaaaaaaaaaagccgaaaaaaaaaaaaaaaacacctgaatgcggaagagctcggctcccgtttagcattttgtacttaaggaaataaaaaaccaacaaaggatctcacattttcttaaaaagtgaagattgctgtatactatttattcaacttataatttatgttactccttgatctttgtcttttgtcatgacaaagcatttatttaataaagttatgcattcagtt

SEQ ID NO: 1940 - protein, 272 aa, Homo sapiens
MVLLTAVLLLLAAYAGPAQSLGSFVHCEPCDEKALSMCPPSPLGCELVKEPGCGCCMTCALAEGQSCGVYTERCAQGLRCLPRQDEEKPLHALLHGRGVCLNEKSYREQVKIERDSREHEEPTTSEMAEETYSPKIFRPKHTRISELKAEAVKKDRRKKLTQSKFVGGAENTAHPRIISAPEMRQESEQGPCRRHMEASLQELKASPRMVPRAVYLPNCDRKGFYKRKQCKPSRGRKRGICWCVDKYGMKLPGMEYVDGDFQCHTFDSSNVE

SEQ ID NO: 1941 - DNA, 2102 bp, Homo sapiens
gctgcccgggctgcgcggcgtctgcaggcgccaccgctgcctctttccggctgtgaccctcctcgccgccgccgcttggctgcgtcctccgactccccgcgccgccgagaccaggctcccgctccggttgcggccgcaccgccctccgcggccgccccctggggatccagcgagcgcggtcgtccttggtggaaggaaccatgaactggcatctccccctcttcctcttggcctctgtgacgctgccttccatctgctcccacttcaatcctctgtctctcgaggaactaggctccaacacggggatccaggttttcaatcagattgtgaagtcgaggcctcatgacaacatcgtgatctctccccatgggattgcgtcggtcctggggatgcttcagctgggggcggacggcaggaccaagaagcagctcgccatggtgatgagatacggcgtaaatggagttggtaaaatattaaagaagatcaacaaggccatcgtctccaagaagaataaagacattgtgacagtggctaacgccgtgtttgttaagaatgcctctgaaattgaagtgccttttgttacaaggaacaaagatgtgttccagtgtgaggtccggaatgtgaactttgaggatccagcctctgcctgtgattccatcaatgcatgggttaaaaatgaaaccagggatatgattgacaatctgctgtccccagatcttattgatggtgtgctcaccagactggtcctcgtcaacgcagtgtatttcaagggtctgtggaaatcacggttccaacccgagaacacaaagaaacgcactttcgtggcagccgacgggaaatcctatcaagtgccaatgctggcccagctctccgtgttccggtgtgggtcgacaagtgcccccaatgatttatggtacaacttcattgaactgccctaccacggggaaagcatcagcatgctgattgcactgccgactgagagctccactccgctgtctgccatcatcccacacatcagcaccaagaccatagacagctggatgagcatcatggtgcccaagagggtgcaggtgatcctgcccaagttcacagctgtagcacaaacagatttgaaggagccgctgaaagttcttggcattactgacatgtttgattcatcaaaggcaaattttgcaaaaataacaacagggtcagaaaacctccatgtttctcatatcttgcaaaaagcaaaaattgaagtcagtgaagatggaaccaaagcttcagcagcaacaactgcaattctcattgcaagatcatcgcctccctggtttatagtagacagaccttttctgtttttcatccgacataatcctacaggtgctgtgttattcatggggcagataaacaaaccctgaagagtatacaaaagaaaccatgcaaagcaacgactactttgctacgaagaaagactcctttcctgcatctttcatagttctgttaaatatttttgtacatcgcttctttttcaaaactagttcttaggaacagactcgatgcaagtgtttctgttctgggaggtattggagggaaaaaacaagcaggatggctggaacactgtactgaggaatgaatagaaaggcttccagatgtctaaaagattctttaaactactgaactgttacctaggttaacaaccctgttgagtatttgctgtttgtccagttcaggaatttttgttttgttttgtctatatgtgcggcttttcagaagaaatttaatcagtgtgacagaaaaaaaaatgttttatggtagcttttactttttatgaaaaaaaaattatttgccttttaaattcttttcccccatccccctccaaagtcttgatagcaagcgttattttggtggtagaaacggtgaaatctctagcctctttgtgtttttgttgttgttgttgttgttgttttatataatgcatgtattcactaaaataaaatttaaaaaactcctgtcttgctagacaaggttgctgttgtgcagtgtgcctgtcactactggtctgtactccttggatttgcatttttgtattttgtacaaagtaaaaataaactgttatgagtagt

SEQ ID NO: 1942 - protein, 398 aa, Homo sapiens
MNWHLPLFLLASVTLPSICSHFNPLSLEELGSNTGIQVFNQIVKSRPHDNIVISPHGIASVLGMLQLGADGRTKKQLAMVMRYGVNGVGKILKKINKAIVSKKNKDIVTVANAVFVKNASEIEVPFVTRNKDVFQCEVRNVNFEDPASACDSINAWVKNETRDMIDNLLSPDLIDGVLTRLVLVNAVYFKGLWKSRFQPENTKKRTFVAADGKSYQVPMLAQLSVFRCGSTSAPNDLWYNFIELPYHGESISMLIALPTESSTPLSAIIPHISTKTIDSWMSIMVPKRVQVILPKFTAVAQTDLKEPLKVLGITDMFDSSKANFAKITTGSENLHVSHILQKAKIEVSEDGTKASAATTAILIARSSPPWFIVDRPFLFFIRHNPTGAVLFMGQINKP

SEQ ID NO: 1943 - DNA, 4749 bp, Homo sapiens
gggagggacgaaccgcgcgaccgagccctacaaaacccgccccggccgagtggcgaggcgagctttccagccgggctcccagagccgcgctgcgcaggagacgcggtggcctgagagcctgagggtccccggactcgcccaggctctgagcgcgcgcccaccatgagcgcccggaccgcccccaggccgcaggtgctcctgctgccgctcctgctggtgctcctggcggcggcgcccgcagccagcaagggttgtgtctgtaaagacaaaggccagtgcttctgtgacggggccaaaggggagaagggggagaagggctttcctggaccccccggttctcctggccagaaaggattcacaggtcctgaaggcttgcctggaccgcagggacccaagggtttcccaggtgcccagggtgacccaggacttaaaggagaaaaaggtgaaacacttcagcctgaggggcaagtgggtgtcccaggtgacccggggctcagaggccaacctgggagaaagggcttggatggaattcctggaactccgggagtgaaaggattaccaggacctaaaggcgaactggttgttccaggcccaccaggacctccagggccccctggccatcctggcccccaaggtccacctggagaccaaggttttccaggtacaaaaggatcactgggttgtcctggaaaaatgggagagcctgggttacctggaaagccaggcctcccaggagccaaggtatgcaaaaattcaagctatcacagaagagagggaacaccaggttttccaggagaaagaggcaattctggggaacatggagaaattggactccctggacttccaggtctccctggaactccaggaaatgaagggcttgatggaccacgaggatttcctggagaaactggatcaccaggaattccaggtcatcaaggtgaaatgggaccactgggtcaaagaggatatccaggaaatccgggaattttagggccaccaggtgaagatggagtgattgggatgatgggctttcctggagccattggccctccagggccccctgggaacccaggcacaccagggcagagggggagccctggaattccaggagtaaagggccagagaggaaccccaggagccaagggggaacaaggagataaaggaaatcccgggccttcagagatatcccacgtaataggggacaaaggagaaccaggtctcaaaggattcgcaggaaatccaggtgagaaaggaaacagaggcgttccagggatgccaggtttaaagggcctcaaaggactacccggaccagcaggaccaccaggactgccgggtgatatgggaaagaaaggagaaatggggcaacctggcccacctggacatttggggcctgctggacctgagggagcccctggaagtcctggaagtcctggcctcccaggtcttccaggatttccaggatctcctggaccaatgggtataagaggtgaccaaggacgtgatggaattcctggtccagccggagaaaagggagaaacgggagccaaaggagacaggggagccccaggttttcctggcctcccgggcagaaaaggggccatgggagatgctggacctcgaggacccacaggcatagaaggattcccagggccaccaggtctgcccggtgcaattatccctggccagacaggaaatcgtggtccaccaggctcaagaggaagcccaggtactccaggtcttccaggacccagaggtgatcctggattccaggggtttccaggcgtgaaaggaccctgtgggccaagaggtaagccaggcaaggatggaaaaccaggaactcctggaccagctggagaaaaaggcaacaaaggttctaaaggagagccaggaccagctggatcagatggattgccaggtttgaaaggaaaacgtggagacagtggatcacctgcaacctggacaacgagaggctttgtcttcacccgacacagtcaaaccacagcaattccttcatgtccagaggggacagtgccactctacagtgggttttcttttctttttgtacaaggaaatcaacgagcccacggacaagaccttgaaagcctattccatcaactgtgaaagctggggaattagaaaaaataataagtcgctgtcaggtgtgcatgaagaaaagacactgaagctaaaaaagacagcagaactgctatttttcatcctaaagaacaaagtaatgacagaacatgctgttatttaggtatttttctttaaccaaacaatattgctccatgatgacttagtacaaagtttcaatttgtttccccacaaaacaaagcaattctttcaagtcagttctgtgatctgggtctctaatctgtgctgtttcaaagttctctgtggcaaagcagcaactattcacaaaatatcaccaaaaacctattccacttacatccaaggcactgtcactacggtgattgtatgaagtttgaatgctgcaagttatgaaatatttggcccgctggattcccacatttgtcttctttctgtctttaagactcagggaggctaaatcagtgtttgattgccccgccaacccttcctgaaacttcagaccctgggtaggggaagagaagggggcatgtggtatcctggagcattgtgtatagaactggattttcagacctgctgaggaccgtaaggcctgatggaacacagaactgaactgaggttcatggattttccaggactgtttcaaacatgcccattactaacggcaaaagggggattccctgatggaaccataatacccttggaaatactgtatggttttgttttgttttgttggtttttaaagatttttgtttgtttattgaattcatttcactgtagctctaaaatctgcttgtattccaagcatataaaattttcccccttagtgaattagttttaaaatgatattgttatatacatactatgaaatatgtataactttaacttctgttttaccagcatacccacacaaataacaagaatactacttatgaaatgtgcactttatcctcattccataaatgtcggtgcataccttatgtaagggagcagttcaataatccatgaaagaacttaaggcatttgttggtttatcagactcggaatctattttctcattgctctgaatatgtcatcactctaggttttacagatttattcctttgttacttctctaattcttcctttgtaaaaaaaaaaaaaagcaacactttttatgttatatgttgttcttacaaaccatactgaaagagtccattgtttaaaaatcttaatgtatcaaactgtataacttggccgctgtatgtcttaaaacctgcttttcaatgtgttgatacattcccaaggttacttaattcaacttaactatcatcttattcagcaccaagcatgtcccaggcactgtactaacctacagagatgctaagagaaaaaaaagacttgtttctgatctaatatcccagaaaaagtaactcattgctctgttaataatctcacatatacaagtagcttccctcccctctagttttttcttccttttcactgctgttatatttcatcatgataattcagcaggcccaagtaaaggttaaaaataaggtctatgcctagggaaactcagggcttctagtttctcttagaaaagctaagagaagataaggtctgaataatagcagaaaaaccaacatctacaaaacattaaactagtgttatacttgatgataacactatttgatgagtcttagagtccagacacaaagagacaaagctttgaagatgctttttgatctacctaggtggagttggtggtgctgatatttaaattcaggctactgcttcaatctcaattgctttgtaagtgaaaaacatgacccagaggacagcacagactatggccatggctcacatggtttacatccttcactgctcacgtgtttgctgtcaagccatttttacatctaaactaagatgtgcagcatttcacttatttagattcacttaacaaacaaatttttctgctttaaaaatgtcttattgtcccaagtgtactatagcggcatatagagctagctaatctctacaaaccctctgtaggccagtagttctcaaagtgtggtctctggaagagcagtatcagcatcatctgggaacttgtcacagatgcagattctagggaccactccagacctacacaatcagaaactcttgggggagggcccgaaatatctatgttttaccaagcccaccacatgattctgatgtactctaaatactgagaaaacctgttctagacaaatacccaagcaacaactccgcaggcagttaccaagtacggctggctacaactgctccatccgtgcctctttttaaagttcaaactcacaggtgactctaaggttatctacttttactcataagtaaaagccctagactggtgctaatgtcaaaccactggcctccactcaggcctccatcttctcatgccctcttaccagtatttaacttctgaggaagacaagtgatgctaaaacctgaaattccaatgaagccatatgaacagctgttcagttgcacttctaagactttacttagcagtaaattatagctcatgtgcattattttccagataacttagcttatgagtagcttatacaattatgaagatttaatattacagataaaatgtaaactgtttcttta

SEQ ID NO: 1944 - protein, 652 aa, Homo sapiens
MSARTAPRPQVLLLPLLLVLLAAAPAASKGCVCKDKGQCFCDGAKGEKGEKGFPGPPGSPGQKGFTGPEGLPGPQGPKGFPGAQGDPGLKGEKGETLQPEGQVGVPGDPGLRGQPGRKGLDGIPGTPGVKGLPGPKGELVVPGPPGPPGPPGHPGPQGPPGDQGFPGTKGSLGCPGKMGEPGLPGKPGLPGAKVCKNSSYHRREGTPGFPGERGNSGEHGEIGLPGLPGLPGTPGNEGLDGPRGFPGETGSPGIPGHQGEMGPLGQRGYPGNPGILGPPGEDGVIGMMGFPGAIGPPGPPGNPGTPGQRGSPGIPGVKGQRGTPGAKGEQGDKGNPGPSEISHVIGDKGEPGLKGFAGNPGEKGNRGVPGMPGLKGLKGLPGPAGPPGLPGDMGKKGEMGQPGPPGHLGPAGPEGAPGSPGSPGLPGLPGFPGSPGPMGIRGDQGRDGIPGPAGEKGETGAKGDRGAPGFPGLPGRKGAMGDAGPRGPTGIEGFPGPPGLPGAIIPGQTGNRGPPGSRGSPGTPGLPGPRGDPGFQGFPGVKGPCGPRGKPGKDGKPGTPGPAGEKGNKGSKGEPGPAGSDGLPGLKGKRGDSGSPATWTTRGFVFTRHSQTTAIPSCPEGTVPLYSGFSFLFVQGNQRAHGQDLESLFHQL

SEQ ID NO: 1945 - DNA, 2241 bp, Homo sapiens
gggagggacgaaccgcgcgaccgagccctacaaaacccgccccggccgagtggcgaggcgagctttccagccgggctcccagagccgcgctgcgcaggagacgcggtggcctgagagcctgagggtccccggactcgcccaggctctgagcgcgcgcccaccatgagcgcccggaccgcccccaggccgcaggtgctcctgctgccgctcctgctggtgctcctggcggcggcgcccgcagccagcaagggttgtgtctgtaaagacaaaggccagtgcttctgtgacggggccaaaggggagaagggggagaagggctttcctggaccccccggttctcctggccagaaaggattcacaggtcctgaaggcttgcctggaccgcagggacccaaggaaaagggagatgaaggcactccaggcccaccagggcccagaggagctcgtggcccacaaggagcccctggatggccaggcctgaaaggaagtaaaggggaacgaggccgcccaggaaaggatgccatggggactcctgggtccccaggttgtgctggttcaccaggtcttccaggatcaccgggacctccaggaccgccagggcctcccggtctcccaggattgccagggttacatggtgtaaaaggaatcccaggtgcccagggtgacccaggacttaaaggagaaaaaggtgaaacacttcagcctgaggggcaagtgggtgtcccaggtgacccggggctcagaggccaacctgggagaaagggcttggatggaattcctggaactccgggagtgaaaggattaccaggacctaaaggcgaactggctctgagtggtgagaaaggggaccaaggtcctccaggggatcctggctcccctgggtccccaggacctgcaggaccagctggaccacctggctacggaccccaaggagaacctggtctccagggcacgcaaggagttcctggagcccccggaccacccggagaagccggttgtgtttcaacaccagttccaggcccaccaggacctccagggccccctggccatcctggcccccaaggtccacctgccatgcctggaggaccaggaacaccaggttttccaggagaaagaggcaattctggggaacatggagaaattggactccctggacttccaggtctccctggaactccaggaaatgaagggcttgatggaccacgaggagatccagggcagcctggaccacctggagaacaaggacccccaggaaggtgcatagagggtcccaggggagcccaaggacttccaggcttaaatggattgaaagggcaacaaggcagaagaggtaaaacggggccaaagggagacccaggaattccaggcttggatagatcaggatttcctggagaaactggatcaccaggaattccaggtcatcaaggtgaaatgggaccactgggtcaaagaggatatccaggaaatccgggaattttagggccaccaggaaatccaggtgagaaaggaaacagaggcgttccagggatgccaggtttaaagggcctcaaaggactacccggaccagcaggaccaccaggttctaaaggaaaaaggggaactttgggattcccaggtcgagcaggaagaccaggcctcccaggtattcatggtctccagggagataagggagagccaggttattcagaaggactgccgggtgatatgggaaagaaaggagaaatggggcaacctggcccacctggacatttggggcctgctggacctgagggagcccctggaagtcctggaagtcctggcctcccaggagccaaaggagacaggggagccccaggttttcctggcctcccgggcagaaaaggggccatgggagatgctggacctcgaggacccacaggcatagaaggattcccagggccaccaggtctgcccggtgcaattatccctggccagacaggaaatcgtggtccaccaggctcaagaggaagcccaggtactccaggtcttccaggacccagaggtgatcctggattccaggggtttccaggcgtgaaaggtgtacgtggagaccctggcacacttaagattatctcccttccaggaagcccagggccacctggcacacctggagaaccagggatgcagggagaacctgggccaccagggccacctggaaacctaggaactcctggaccagctggagaaaaaggcaacaaaggttctaaaggagagccaggtaaa

SEQ ID NO: 1946 - protein, 693 aa, Homo sapiens
MSARTAPRPQVLLLPLLLVLLAAAPAASKGCVCKDKGQCFCDGAKGEKGEKGFPGPPGSPGQKGFTGPEGLPGPQGPKEKGDEGTPGPPGPRGARGPQGAPGWPGLKGSKGERGRPGKDAMGTPGSPGCAGSPGLPGSPGPPGPPGPPGLPGLPGLHGVKGIPGAQGDPGLKGEKGETLQPEGQVGVPGDPGLRGQPGRKGLDGIPGTPGVKGLPGPKGELALSGEKGDQGPPGDPGSPGSPGPAGPAGPPGYGPQGEPGLQGTQGVPGAPGPPGEAGCVSTPVPGPPGPPGPPGHPGPQGPPAMPGGPGTPGFPGERGNSGEHGEIGLPGLPGLPGTPGNEGLDGPRGDPGQPGPPGEQGPPGRCIEGPRGAQGLPGLNGLKGQQGRRGKTGPKGDPGIPGLDRSGFPGETGSPGIPGHQGEMGPLGQRGYPGNPGILGPPGNPGEKGNRGVPGMPGLKGLKGLPGPAGPPGSKGKRGTLGFPGRAGRPGLPGIHGLQGDKGEPGYSEGLPGDMGKKGEMGQPGPPGHLGPAGPEGAPGSPGSPGLPGAKGDRGAPGFPGLPGRKGAMGDAGPRGPTGIEGFPGPPGLPGAIIPGQTGNRGPPGSRGSPGTPGLPGPRGDPGFQGFPGVKGVRGDPGTLKIISLPGSPGPPGTPGEPGMQGEPGPPGPPGNLGTPGPAGEKGNKGSKGEPGK

SEQ ID NO: 1947 - DNA, 6622 bp, Homo sapiens
gggagggacgaaccgcgcgaccgagccctacaaaacccgccccggccgagtggcgaggcgagctttccagccgggctcccagagccgcgctgcgcaggagacgcggtggcctgagagcctgagggtccccggactcgcccaggctctgagcgcgcgcccaccatgagcgcccggaccgcccccaggccgcaggtgctcctgctgccgctcctgctggtgctcctggcggcggcgcccgcagccagcaagggttgtgtctgtaaagacaaaggccagtgcttctgtgacggggccaaaggggagaagggggagaagggctttcctggaccccccggttctcctggccagaaaggattcacaggtcctgaaggcttgcctggaccgcagggaccaagaggagcccctggatggccaggcctgaaaggaagtaaaggggaacgaggccgcccaggaaaggatgccatggggactcctgggtccccaggttgtgctggttcaccaggtcttccaggatcaccgggacctccaggaccgccaggtgacatcgtttttcgcaagggtccacctggagatcacggactgccaggctatctagggtctccaggaatcccaggagttgatgggcccaaaggtgcccagggtgacccaggacttaaaggagaaaaaggtgaaacacttcagcctgaggggcaagtgggtgtcccaggtgacccggggctcagaggccaacctgggagaaagggcttggatggaattcctggaactccgggagtgaaaggattaccaggacctaaaggcgaactggctctgagtggtgagaaaggggaccaaggtcctccaggggatcctggctcccctgggtccccaggacctgcaggaccagctggaccacctggctacggaccccaaggagaacctggtctccagggcacgcaaggagttcctggagcccccggaccacccggagaagccggccctaggggagagctcagtgtttcaacaccagttccaggcccaccaggacctccagggccccctggccatcctggcccccaaggtccacctggtatccctggatccctggggaaatgtggagatcctggtcttccagggcctgatggtgaaccaggaattccaggaattggatttcctgggcctcctggacctaagggagaccaaggttttccaggtacaaaaggatcactgggttgtcctggaaaaatgggagagcctgggttacctggaaagccaggcctcccaggagccaagggagaaccagcagtagccatgcctggaggaccaggaacaccaggttttccaggagaaagaggcaattctggggaacatggagaaattggactccctggacttccaggtctccctggaactccaggaaatgaagggcttgatggaccacgaggagatccagggcagcctggaccacctggagaacaaggacccccaggaaggtgcatagagggtcccaggggagcccaaggacttccaggcttaaatggattgaaagggcaacaaggcagaagaggtaaaacggggccaaagggagacccaggaattccaggcttggatagatcaggatttcctggagaaactggatcaccaggaattccaggtcatcaaggtgaaatgggaccactgggtcaaagaggatatccaggaaatccgggaattttagggccaccaggtgaagatggagtgattgggatgatgggctttcctggagccattggccctccagggccccctgggaacccaggcacaccagggcagagggggagccctggaattccaggagtaaagggccagagaggaaccccaggagccaagggggaacaaggagataaaggaaatcccgggccttcagagatatcccacgtaataggggacaaaggagaaccaggtctcaaaggattcgcaggaaatccaggtgagaaaggaaacagaggcgttccagggatgccaggtttaaagggcctcaaaggactacccggaccagcaggaccaccaggccccagaggagatttgggcagcactgggaatcctggagaaccaggactgcgtggtataccaggaagcatggggaacatgggcatgccaggttctaaaggaaaaaggggaactttgggattcccaggtcgagcaggaagaccaggcctcccaggtattcatggtctccagggagataagggagagccaggttattcagaaggtacaaggccaggaccaccgggaccaacggtatataggccactgaaatatttacattttagtggtggaggggatccaggactgccgggtgatatgggaaagaaaggagaaatggggcaacctggcccacctggacatttggggcctgctggacctgagggagcccctggaagtcctggaagtcctggcctcccaggtcctcatggtgatttgggttttaaaggaatcaaaggcctcctgggccctccaggaatcagaggccctccaggtcttccaggatttccaggatctcctggaccaatgggtataagaggtgaccaaggacgtgatggaattcctggtccagccggagaaaagggagaaacggccttcttctttgcaggagccaaaggagacaggggagccccaggttttcctggcctcccgggcagaaaaggggccatgggagatgctggacctcgaggacccacaggcatagaaggattcccagggccaccaggtctgcccggtgcaattatccctggccagacaggaaatcgtggtccaccaggctcaagaggaagcccaggtgcgcctggtccccctggacctccagggagtcatgtaataggcataaaaggagacaaagggtctatgggccaccctggcccaaaaggtccacctggaactgcaggagacatgggaccaccaggtcgtctgggagcaccaggtactccaggtcttccaggacccagaggtgatcctggattccaggggtttccaggcgtgaaaggagaaaagggtaatcctggatttctaggatccattggacctccaggaccaattgggccaaaaggaccacctggtgtacgtggagaccctggcacacttaagattatctcccttccaggaagcccagggccacctggcacacctggagaaccagggatgcagggagaacctgggccaccagggccacctggaaacctaggaccctgtgggccaagaggtaagccaggcaaggatggaaaaccaggaactcctggaccagctggagaaaaaggcaacaaaggttctaaaggagagccaggaccagctggatcagatggattgccaggtttgaaaggaaaacgtggagacagtggatcacctgcaacctggacaacgagaggctttgtcttcacccgacacagtcaaaccacagcaattccttcatgtccagaggggacagtgccactctacagtgggttttcttttctttttgtacaaggaaatcaacgagcccacggacaagaccttggaactcttggcagctgcctgcagcgatttaccacaatgccattcttattctgcaatgtcaatgatgtatgtaattttgcatctcgaaatgattattcatactggctgtcaacaccagctctgatgccaatgaacatggctcccattactggcagagcccttgagccttatataagcagatgcactgtttgtgaaggtcctgcgatcgccatagccgttcacagccaaaccactgacattcctccatgtcctcacggctggatttctctctggaaaggattttcattcatcatgttcacaagtgcaggttctgagggcaccgggcaagcactggcctcccctggctcctgcctggaagaattccgagccagcccatttctagaatgtcatggaagaggaacgtgcaactactattcaaattcctacagtttctggctggcttcattaaacccagaaagaatgttcagaaagcctattccatcaactgtgaaagctggggaattagaaaaaataataagtcgctgtcaggtgtgcatgaagaaaagacactgaagctaaaaaagacagcagaactgctatttttcatcctaaagaacaaagtaatgacagaacatgctgttatttaggtatttttctttaaccaaacaatattgctccatgatgacttagtacaaagtttcaatttgtttccccacaaaacaaagcaattctttcaagtcagttctgtgatctgggtctctaatctgtgctgtttcaaagttctctgtggcaaagcagcaactattcacaaaatatcaccaaaaacctattccacttacatccaaggcactgtcactacggtgattgtatgaagtttgaatgctgcaagttatgaaatatttggcccgctggattcccacatttgtcttctttctgtctttaagactcagggaggctaaatcagtgtttgattgccccgccaacccttcctgaaacttcagaccctgggtaggggaagagaagggggcatgtggtatcctggagcattgtgtatagaactggattttcagacctgctgaggaccgtaaggcctgatggaacacagaactgaactgaggttcatggattttccaggactgtttcaaacatgcccattactaacggcaaaagggggattccctgatggaaccataatacccttggaaatactgtatggttttgttttgttttgttggtttttaaagatttttgtttgtttattgaattcatttcactgtagctctaaaatctgcttgtattccaagcatataaaattttcccccttagtgaattagttttaaaatgatattgttatatacatactatgaaatatgtataactttaacttctgttttaccagcatacccacacaaataacaagaatactacttatgaaatgtgcactttatcctcattccataaatgtcggtgcataccttatgtaagggagcagttcaataatccatgaaagaacttaaggcatttgttggtttatcagactcggaatctattttctcattgctctgaatatgtcatcactctaggttttacagatttattcctttgttacttctctaattcttcctttgtaaaaaaaaaaaaaagcaacactttttatgttatatgttgttcttacaaaccatactgaaagagtccattgtttaaaaatcttaatgtatcaaactgtataacttggccgctgtatgtcttaaaacctgcttttcaatgtgttgatacattcccaaggttacttaattcaacttaactatcatcttattcagcaccaagcatgtcccaggcactgtactaacctacagagatgctaagagaaaaaaaagacttgtttctgatctaatatcccagaaaaagtaactcattgctctgttaataatctcacatatacaagtagcttccctcccctctagttttttcttccttttcactgctgttatatttcatcatgataattcagcaggcccaagtaaaggttaaaaataaggtctatgcctagggaaactcagggcttctagtttctcttagaaaagctaagagaagataaggtctgaataatagcagaaaaaccaacatctacaaaacattaaactagtgttatacttgatgataacactatttgatgagtcttagagtccagacacaaagagacaaagctttgaagatgctttttgatctacctaggtggagttggtggtgctgatatttaaattcaggctactgcttcaatctcaattgctttgtaagtgaaaaacatgacccagaggacagcacagactatggccatggctcacatggtttacatccttcactgctcacgtgtttgctgtcaagccatttttacatctaaactaagatgtgcagcatttcacttatttagattcacttaacaaacaaatttttctgctttaaaaatgtcttattgtcccaagtgtactatagcggcatatagagctagctaatctctacaaaccctctgtaggccagtagttctcaaagtgtggtctctggaagagcagtatcagcatcatctgggaacttgtcacagatgcagattctagggaccactccagacctacacaatcagaaactcttgggggagggcccgaaatatctatgttttaccaagcccaccacatgattctgatgtactctaaatactgagaaaacctgttctagacaaatacccaagcaacaactccgcaggcagttaccaagtacggctggctacaactgctccatccgtgcctctttttaaagttcaaactcacaggtgactctaaggttatctacttttactcataagtaaaagccctagactggtgctaatgtcaaaccactggcctccactcaggcctccatcttctcatgccctcttaccagtatttaacttctgaggaagacaagtgatgctaaaacctgaaattccaatgaagccatatgaacagctgttcagttgcacttctaagactttacttagcagtaaattatagctcatgtgcattattttccagataacttagcttatgagtagcttatacaattatgaagatttaatattacagataaaatgtaaactgtttcttta

SEQ ID NO: 1948 - protein, 1297 aa, Homo sapiens
MSARTAPRPQVLLLPLLLVLLAAAPAASKGCVCKDKGQCFCDGAKGEKGEKGFPGPPGSPGQKGFTGPEGLPGPQGPRGAPGWPGLKGSKGERGRPGKDAMGTPGSPGCAGSPGLPGSPGPPGPPGDIVFRKGPPGDHGLPGYLGSPGIPGVDGPKGAQGDPGLKGEKGETLQPEGQVGVPGDPGLRGQPGRKGLDGIPGTPGVKGLPGPKGELALSGEKGDQGPPGDPGSPGSPGPAGPAGPPGYGPQGEPGLQGTQGVPGAPGPPGEAGPRGELSVSTPVPGPPGPPGPPGHPGPQGPPGIPGSLGKCGDPGLPGPDGEPGIPGIGFPGPPGPKGDQGFPGTKGSLGCPGKMGEPGLPGKPGLPGAKGEPAVAMPGGPGTPGFPGERGNSGEHGEIGLPGLPGLPGTPGNEGLDGPRGDPGQPGPPGEQGPPGRCIEGPRGAQGLPGLNGLKGQQGRRGKTGPKGDPGIPGLDRSGFPGETGSPGIPGHQGEMGPLGQRGYPGNPGILGPPGEDGVIGMMGFPGAIGPPGPPGNPGTPGQRGSPGIPGVKGQRGTPGAKGEQGDKGNPGPSEISHVIGDKGEPGLKGFAGNPGEKGNRGVPGMPGLKGLKGLPGPAGPPGPRGDLGSTGNPGEPGLRGIPGSMGNMGMPGSKGKRGTLGFPGRAGRPGLPGIHGLQGDKGEPGYSEGTRPGPPGPTVYRPLKYLHFSGGGDPGLPGDMGKKGEMGQPGPPGHLGPAGPEGAPGSPGSPGLPGPHGDLGFKGIKGLLGPPGIRGPPGLPGFPGSPGPMGIRGDQGRDGIPGPAGEKGETAFFFAGAKGDRGAPGFPGLPGRKGAMGDAGPRGPTGIEGFPGPPGLPGAIIPGQTGNRGPPGSRGSPGAPGPPGPPGSHVIGIKGDKGSMGHPGPKGPPGTAGDMGPPGRLGAPGTPGLPGPRGDPGFQGFPGVKGEKGNPGFLGSIGPPGPIGPKGPPGVRGDPGTLKIISLPGSPGPPGTPGEPGMQGEPGPPGPPGNLGPCGPRGKPGKDGKPGTPGPAGEKGNKGSKGEPGPAGSDGLPGLKGKRGDSGSPATWTTRGFVFTRHSQTTAIPSCPEGTVPLYSGFSFLFVQGNQRAHGQDLGTLGSCLQRFTTMPFLFCNVNDVCNFASRNDYSYWLSTPALMPMNMAPITGRALEPYISRCTVCEGPAIAIAVHSQTTDIPPCPHGWISLWKGFSFIMFTSAGSEGTGQALASPGSCLEEFRASPFLECHGRGTCNYYSNSYSFWLASLNPERMFRKPIPSTVKAGELEKIISRCQVCMKKRH

SEQ ID NO: 1949 - DNA, 6709 bp, Homo sapiens
gggagggacgaaccgcgcgaccgagccctacaaaacccgccccggccgagtggcgaggcgagctttccagccgggctcccagagccgcgctgcgcaggagacgcggtggcctgagagcctgagggtccccggactcgcccaggctctgagcgcgcgcccaccatgagcgcccggaccgcccccaggccgcaggtgctcctgctgccgctcctgctggtgctcctggcggcggcgcccgcagccagcaagggttgtgtctgtaaagacaaaggccagtgcttctgtgacggggccaaaggggagaagggggagaagggctttcctggaccccccggttctcctggccagaaaggattcacaggtcctgaaggcttgcctggaccgcagggacccaagggtttgccaggccctccaggttttcctgggcctgttggcccacctggtcctccgggattctttgtgaaatattatgacacataccaggaaaagggagatgaaggcactccaggcccaccagggcccagaggagctcgtggcccacaaggtaagaataaatttcttcctaaagcatttgctgaacatatttctggctttctttcaagaggagcccctggatggccaggcctgaaaggaagtaaaggggaacgaggccgcccaggaaaggatgccatggggactcctgggtccccaggttgtgctggttcaccaggtcttccaggatcaccgggacctccaggaccgccaggtgcccagggtgacccaggacttaaaggagaaaaaggtgaaacacttcagcctgaggggcaagtgggtgtcccaggtgacccggggctcagaggccaacctgggagaaagggcttggatggaattcctggaactccgggagtgaaaggattaccaggacctaaaggcgaactggctctgagtggtgagaaaggggaccaaggtcctccaggggatcctggctcccctgggtccccaggacctgcaggaccagctggaccacctggctacggaccccaaggagaacctggtctccagggcacgcaaggagttcctggagcccccggaccacccggagaagccggccctaggggagagctcagtgtttcaacaccagttccaggcccaccaggacctccagggccccctggccatcctggcccccaaggtccacctggtatccctggatccctggggaaatgtggagatcctggtcttccagggcctgatggtgaaccaggaattccaggaattggatttcctgggcctcctggacctaagggagaccaaggttttccaggtacaaaaggatcactgggttgtcctggaaaaatgggagagcctgggttacctggaaagccaggcctcccaggagccaagggagaaccagcagtagccatgcctggaggaccaggaacaccaggttttccaggagaaagaggcaattctggggaacatggagaaattggactccctggacttccaggtctccctggaactccaggaaatgaagggcttgatggaccacgaggagatccagggcagcctggaccacctggagaacaaggacccccaggaaggtgcatagagggtcccaggggagcccaaggacttccaggcttaaatggattgaaagggcaacaaggcagaagaggtaaaacggggccaaagggagacccaggaattccaggcttggatagatcaggatttcctggagaaactggatcaccaggaattccaggtcatcaaggtgaaatgggaccactgggtcaaagaggatatccaggaaatccgggaattttagggccaccaggtgaagatggagtgattgggatgatgggctttcctggagccattggccctccagggccccctgggaacccaggcacaccagggcagagggggagccctggaattccaggagtaaagggccagagaggaaccccaggagccaagggggaacaaggagataaaggaaatcccgggccttcagagatatcccacgtaataggggacaaaggagaaccaggtctcaaaggattcgcaggaaatccaggtgagaaaggaaacagaggcgttccagggatgccaggtttaaagggcctcaaaggactacccggaccagcaggaccaccaggccccagaggagatttgggcagcactgggaatcctggagaaccaggactgcgtggtataccaggaagcatggggaacatgggcatgccaggttctaaaggaaaaaggggaactttgggattcccaggtcgagcaggaagaccaggcctcccaggtattcatggtctccagggagataagggagagccaggttattcagaaggtacaaggccaggaccaccgggaccaacgggggatccaggactgccgggtgatatgggaaagaaaggagaaatggggcaacctggcccacctggacatttggggcctgctggacctgagggagcccctggaagtcctggaagtcctggcctcccaggaaagccaggtcctcatggtgatttgggttttaaaggaatcaaaggcctcctgggccctccaggaatcagaggccctccaggatttccaggatctcctggaccaatgggtataagaggtgaccaaggacgtgatggaattcctggtccagccggagaaaagggagaaacgggtacaacttgctcattatctttgatccgagccaaaggagacaggggagccccaggttttcctggcctcccgggcagaaaaggggccatgggagatgctggacctcgaggacccacaggcatagaaggattcccagggccaccaggtctgcccggtgcaattatccctggccagacaggaaatcgtggtccaccaggctcaagaggaagcccaggtgcgcctggtccccctggacctccagggagtcatgtaataggcataaaaggagacaaagggtctatgggccaccctggcccaaaaggtccacctggaactgcaggagacatgggaccaccaggtcgtctgggagcaccaggtactccaggtcttccaggacccagaggtgatcctggattccaggggtttccaggcgtgaaaggagaaaagggtaatcctggatttctaggatccattggacctccaggaccaattgggccaaaaggaccacctggtgtacgtggagaccctggcacacttaagattatctcccttccaggaagcccagggccacctggcacacctggagaaccagggatgcagggagaacctgggccaccagggccacctggaaacctaggaccctgtgggccaagaggtaagccaggcaaggatggaaaaccaggaactcctggaccagctggagaaaaaggcaacaaaggttctaaaggagagccaggaccagctggatcagatggattgccaggtttgaaaggaaaacgtggagacagtggatcacctgcaacctggacaacgagaggctttgtcttcacccgacacagtcaaaccacagcaattccttcatgtccagaggggacagtgccactctacagtgggttttcttttctttttgtacaaggaaatcaacgagcccacggacaagaccttggaactcttggcagctgcctgcagcgatttaccacaatgccattcttattctgcaatgtcaatgatgtatgtaattttgcatctcgaaatgattattcatactggctgtcaacaccagctctgatgccaatgaacatggctcccattactggcagagcccttgagccttatataagcagatgcactgtttgtgaaggtcctgcgatcgccatagccgttcacagccaaaccactgacattcctccatgtcctcacggctggatttctctctggaaaggattttcattcatcatgttcacaagtgcaggttctgagggcaccgggcaagcactggcctcccctggctcctgcctggaagaattccgagccagcccatttctagaatgtcatggaagaggaacgtgcaactactattcaaattcctacagtttctggctggcttcattaaacccagaaagaatgttcagaaagcctattccatcaactgtgaaagctggggaattagaaaaaataataagtcgctgtcaggtgtgcatgaagaaaagacactgaagctaaaaaagacagcagaactgctatttttcatcctaaagaacaaagtaatgacagaacatgctgttatttaggtatttttctttaaccaaacaatattgctccatgatgacttagtacaaagtttcaatttgtttccccacaaaacaaagcaattctttcaagtcagttctgtgatctgggtctctaatctgtgctgtttcaaagttctctgtggcaaagcagcaactattcacaaaatatcaccaaaaacctattccacttacatccaaggcactgtcactacggtgattgtatgaagtttgaatgctgcaagttatgaaatatttggcccgctggattcccacatttgtcttctttctgtctttaagactcagggaggctaaatcagtgtttgattgccccgccaacccttcctgaaacttcagaccctgggtaggggaagagaagggggcatgtggtatcctggagcattgtgtatagaactggattttcagacctgctgaggaccgtaaggcctgatggaacacagaactgaactgaggttcatggattttccaggactgtttcaaacatgcccattactaacggcaaaagggggattccctgatggaaccataatacccttggaaatactgtatggttttgttttgttttgttggtttttaaagatttttgtttgtttattgaattcatttcactgtagctctaaaatctgcttgtattccaagcatataaaattttcccccttagtgaattagttttaaaatgatattgttatatacatactatgaaatatgtataactttaacttctgttttaccagcatacccacacaaataacaagaatactacttatgaaatgtgcactttatcctcattccataaatgtcggtgcataccttatgtaagggagcagttcaataatccatgaaagaacttaaggcatttgttggtttatcagactcggaatctattttctcattgctctgaatatgtcatcactctaggttttacagatttattcctttgttacttctctaattcttcctttgtaaaaaaaaaaaaaagcaacactttttatgttatatgttgttcttacaaaccatactgaaagagtccattgtttaaaaatcttaatgtatcaaactgtataacttggccgctgtatgtcttaaaacctgcttttcaatgtgttgatacattcccaaggttacttaattcaacttaactatcatcttattcagcaccaagcatgtcccaggcactgtactaacctacagagatgctaagagaaaaaaaagacttgtttctgatctaatatcccagaaaaagtaactcattgctctgttaataatctcacatatacaagtagcttccctcccctctagttttttcttccttttcactgctgttatatttcatcatgataattcagcaggcccaagtaaaggttaaaaataaggtctatgcctagggaaactcagggcttctagtttctcttagaaaagctaagagaagataaggtctgaataatagcagaaaaaccaacatctacaaaacattaaactagtgttatacttgatgataacactatttgatgagtcttagagtccagacacaaagagacaaagctttgaagatgctttttgatctacctaggtggagttggtggtgctgatatttaaattcaggctactgcttcaatctcaattgctttgtaagtgaaaaacatgacccagaggacagcacagactatggccatggctcacatggtttacatccttcactgctcacgtgtttgctgtcaagccatttttacatctaaactaagatgtgcagcatttcacttatttagattcacttaacaaacaaatttttctgctttaaaaatgtcttattgtcccaagtgtactatagcggcatatagagctagctaatctctacaaaccctctgtaggccagtagttctcaaagtgtggtctctggaagagcagtatcagcatcatctgggaacttgtcacagatgcagattctagggaccactccagacctacacaatcagaaactcttgggggagggcccgaaatatctatgttttaccaagcccaccacatgattctgatgtactctaaatactgagaaaacctgttctagacaaatacccaagcaacaactccgcaggcagttaccaagtacggctggctacaactgctccatccgtgcctctttttaaagttcaaactcacaggtgactctaaggttatctacttttactcataagtaaaagccctagactggtgctaatgtcaaaccactggcctccactcaggcctccatcttctcatgccctcttaccagtatttaacttctgaggaagacaagtgatgctaaaacctgaaattccaatgaagccatatgaacagctgttcagttgcacttctaagactttacttagcagtaaattatagctcatgtgcattattttccagataacttagcttatgagtagcttatacaattatgaagatttaatattacagataaaatgtaaactgtttcttta

SEQ ID NO: 1950 - protein, 1326 aa, Homo sapiens
MSARTAPRPQVLLLPLLLVLLAAAPAASKGCVCKDKGQCFCDGAKGEKGEKGFPGPPGSPGQKGFTGPEGLPGPQGPKGLPGPPGFPGPVGPPGPPGFFVKYYDTYQEKGDEGTPGPPGPRGARGPQGKNKFLPKAFAEHISGFLSRGAPGWPGLKGSKGERGRPGKDAMGTPGSPGCAGSPGLPGSPGPPGPPGAQGDPGLKGEKGETLQPEGQVGVPGDPGLRGQPGRKGLDGIPGTPGVKGLPGPKGELALSGEKGDQGPPGDPGSPGSPGPAGPAGPPGYGPQGEPGLQGTQGVPGAPGPPGEAGPRGELSVSTPVPGPPGPPGPPGHPGPQGPPGIPGSLGKCGDPGLPGPDGEPGIPGIGFPGPPGPKGDQGFPGTKGSLGCPGKMGEPGLPGKPGLPGAKGEPAVAMPGGPGTPGFPGERGNSGEHGEIGLPGLPGLPGTPGNEGLDGPRGDPGQPGPPGEQGPPGRCIEGPRGAQGLPGLNGLKGQQGRRGKTGPKGDPGIPGLDRSGFPGETGSPGIPGHQGEMGPLGQRGYPGNPGILGPPGEDGVIGMMGFPGAIGPPGPPGNPGTPGQRGSPGIPGVKGQRGTPGAKGEQGDKGNPGPSEISHVIGDKGEPGLKGFAGNPGEKGNRGVPGMPGLKGLKGLPGPAGPPGPRGDLGSTGNPGEPGLRGIPGSMGNMGMPGSKGKRGTLGFPGRAGRPGLPGIHGLQGDKGEPGYSEGTRPGPPGPTGDPGLPGDMGKKGEMGQPGPPGHLGPAGPEGAPGSPGSPGLPGKPGPHGDLGFKGIKGLLGPPGIRGPPGFPGSPGPMGIRGDQGRDGIPGPAGEKGETGTTCSLSLIRAKGDRGAPGFPGLPGRKGAMGDAGPRGPTGIEGFPGPPGLPGAIIPGQTGNRGPPGSRGSPGAPGPPGPPGSHVIGIKGDKGSMGHPGPKGPPGTAGDMGPPGRLGAPGTPGLPGPRGDPGFQGFPGVKGEKGNPGFLGSIGPPGPIGPKGPPGVRGDPGTLKIISLPGSPGPPGTPGEPGMQGEPGPPGPPGNLGPCGPRGKPGKDGKPGTPGPAGEKGNKGSKGEPGPAGSDGLPGLKGKRGDSGSPATWTTRGFVFTRHSQTTAIPSCPEGTVPLYSGFSFLFVQGNQRAHGQDLGTLGSCLQRFTTMPFLFCNVNDVCNFASRNDYSYWLSTPALMPMNMAPITGRALEPYISRCTVCEGPAIAIAVHSQTTDIPPCPHGWISLWKGFSFIMFTSAGSEGTGQALASPGSCLEEFRASPFLECHGRGTCNYYSNSYSFWLASLNPERMFRKPIPSTVKAGELEKIISRCQVCMKKRH

SEQ ID NO: 1951 - DNA, 6748 bp, Homo sapiens
gggagggacgaaccgcgcgaccgagccctacaaaacccgccccggccgagtggcgaggcgagctttccagccgggctcccagagccgcgctgcgcaggagacgcggtggcctgagagcctgagggtccccggactcgcccaggctctgagcgcgcgcccaccatgagcgcccggaccgcccccaggccgcaggtgctcctgctgccgctcctgctggtgctcctggcggcggcgcccgcagccagcaagggttgtgtctgtaaagacaaaggccagtgcttctgtgacggggccaaaggggagaagggggagaagggctttcctggaccccccggttctcctggccagaaaggattcacaggtcctgaaggcttgcctggaccgcagggacccaagggtttgccaggccctccaggttttcctgggcctgttggcccacctggtcctccgggattctttgtgagatcatcaaggcctggcctcagaggagcccctggatggccaggcctgaaaggaagtaaaggggaacgaggccgcccaggaaaggatgccatggggactcctgggtccccaggttgtgctggttcaccaggtcttccaggatcaccgggacctccaggaccgccaggtaaagatgtggaaggggaccccttttgtgcacagtgccaaatgacagatgtgtgcaaaccacgggcaacaaaccctcctcacagcttagccatcagtgacatcgtttttcgcaagggtccacctggagatcacggactgccaggctatctagggtctccaggaatcccaggagttgatgggcccaaaggtgcccagggtgacccaggacttaaaggagaaaaaggtgaaacacttcagcctgaggggcaagtgggtgtcccaggtgacccggggctcagaggccaacctgggagaaagggcttggatggaattcctggaactccgggagtgaaaggattaccaggacctaaaggcgaactggctctgagtggtgagaaaggggaccaaggtcctccaggggatcctggctcccctgggtccccaggacctgcaggaccagctggaccacctggctacggaccccaaggagaacctggtctccagggcacgcaaggagttcctggagcccccggaccacccggagaagccggccctaggggagagctcagtgtttcaacaccagttccaggcccaccaggacctccagggccccctggccatcctggcccccaaggtccacctggtatccctggatccctggggaaatgtggagatcctggtcttccagggcctgatggtgaaccaggaattccaggaattggatttcctgggcctcctggacctaagggagaccaaggttttccaggtacaaaaggatcactgggttgtcctggaaaaatgggagagcctgggttacctggaaagccaggcctcccaggagccaagggagaaccagcagtagccatgcctggaggaccaggaacaccaggttttccaggagaaagaggcaattctggggaacatggagaaattggactccctggacttccaggtctccctggaactccaggaaatgaagggcttgatggaccacgaggagatccagggcagcctggaccacctggagaacaaggacccccaggaaggtgcatagagggtcccaggggagcccaaggacttccaggcttaaatggattgaaagggcaacaaggcagaagaggtaaaacggggccaaagggagacccaggaattccaggcttggatagatcaggatttcctggagaaactggatcaccaggaattccaggtcatcaaggtgaaatgggaccactgggtcaaagaggatatccaggaaatccgggaattttagggccaccaggtgaagatggagtgattgggatgatgggctttcctggagccattggccctccagggccccctgggaacccaggcacaccagggcagagggggagccctggaattccaggagtaaagggccagagaggaaccccaggagccaagggggaacaaggagataaaggaaatcccgggccttcagagatatcccacgtaataggggacaaaggagaaccaggtctcaaaggattcgcaggaaatccaggtgagaaaggaaacagaggcgttccagggatgccaggtttaaagggcctcaaaggactacccggaccagcaggaccaccaggccccagaggagatttgggcagcactgggaatcctggagaaccaggactgcgtggtataccaggaagcatggggaacatgggcatgccaggttctaaaggaaaaaggggaactttgggattcccaggtcgagcaggaagaccaggcctcccaggtattcatggtctccagggagataagggagagccaggttattcagaaggtacaaggccaggaccaccgggaccaacggtatataggccactgaaatatttacattttagtggtggaggggatccaggactgccgggtgatatgggaaagaaaggagaaatggggcaacctggcccacctggacatttggggcctgctggacctgagggagcccctggaagtcctggaagtcctggcctcccaggtcctcatggtgatttgggttttaaaggaatcaaaggcctcctgggccctccaggaatcagaggccctccaggtcttccaggatttccaggatctcctggaccaatgggtataagaggtgaccaaggacgtgatggaattcctggtccagccggagaaaagggagaaacggccttcttctttgcaggagccaaaggagacaggggagccccaggttttcctggcctcccgggcagaaaaggggccatgggagatgctggacctcgaggacccacaggcatagaaggattcccagggccaccaggtctgcccggtgcaattatccctggccagacaggaaatcgtggtccaccaggctcaagaggaagcccaggtgcgcctggtccccctggacctccagggagtcatgtaataggcataaaaggagacaaagggtctatgggccaccctggcccaaaaggtccacctggaactgcaggagacatgggaccaccaggtactccaggtcttccaggacccagaggtgatcctggattccaggggtttccaggcgtgaaaggagaaaagggtaatcctggatttctaggatccattggacctccaggaccaattgggccaaaaggaccacctggtgtacgtggagaccctggcacacttaagattatctcccttccaggaagcccagggccacctggcacacctggagaaccagggatgcagggagaacctgggccaccagggccacctggaaacctaggcaaggatggaaaaccaggaactcctggaccagctggagaaaaaggcaacaaaggttctaaaggagagccagatggattgccaggtttgaaaggaaaacgtggagacagtggatcacctgcaacctggacaacgagaggctttgtcttcacccgacacagtcaaaccacagcaattccttcatgtccagaggggacagtgccactctacagtgggttttcttttctttttgtacaaggaaatcaacgagcccacggacaagaccttggaactcttggcagctgcctgcagcgatttaccacaatgccattcttattctgcaatgtcaatgatgtatgtaattttgcatctcgaaatgattattcatactggctgtcaacaccagctctgatgccaatgaacatggctcccattactggcagagcccttgagccttatataagcagatgcactgtttgtgaaggtcctgcgatcgccatagccgttcacagccaaaccactgacattcctccatgtcctcacggctggatttctctctggaaaggattttcattcatcatgttcacaagtgcaggttctgagggcaccgggcaagcactggcctcccctggctcctgcctggaagaattccgagccagcccatttctagaatgtcatggaagaggaacgtgcaactactattcaaattcctacagtttctggctggcttcattaaacccagaaagaatgttcagaaagcctattccatcaactgtgaaagctggggaattagaaaaaataataagtcgctgtcaggtgtgcatgaagaaaagacactgaagctaaaaaagacagcagaactgctatttttcatcctaaagaacaaagtaatgacagaacatgctgttatttaggtatttttctttaaccaaacaatattgctccatgatgacttagtacaaagtttcaatttgtttccccacaaaacaaagcaattctttcaagtcagttctgtgatctgggtctctaatctgtgctgtttcaaagttctctgtggcaaagcagcaactattcacaaaatatcaccaaaaacctattccacttacatccaaggcactgtcactacggtgattgtatgaagtttgaatgctgcaagttatgaaatatttggcccgctggattcccacatttgtcttctttctgtctttaagactcagggaggctaaatcagtgtttgattgccccgccaacccttcctgaaacttcagaccctgggtaggggaagagaagggggcatgtggtatcctggagcattgtgtatagaactggattttcagacctgctgaggaccgtaaggcctgatggaacacagaactgaactgaggttcatggattttccaggactgtttcaaacatgcccattactaacggcaaaagggggattccctgatggaaccataatacccttggaaatactgtatggttttgttttgttttgttggtttttaaagatttttgtttgtttattgaattcatttcactgtagctctaaaatctgcttgtattccaagcatataaaattttcccccttagtgaattagttttaaaatgatattgttatatacatactatgaaatatgtataactttaacttctgttttaccagcatacccacacaaataacaagaatactacttatgaaatgtgcactttatcctcattccataaatgtcggtgcataccttatgtaagggagcagttcaataatccatgaaagaacttaaggcatttgttggtttatcagactcggaatctattttctcattgctctgaatatgtcatcactctaggttttacagatttattcctttgttacttctctaattcttcctttgtaaaaaaaaaaaaaagcaacactttttatgttatatgttgttcttacaaaccatactgaaagagtccattgtttaaaaatcttaatgtatcaaactgtataacttggccgctgtatgtcttaaaacctgcttttcaatgtgttgatacattcccaaggttacttaattcaacttaactatcatcttattcagcaccaagcatgtcccaggcactgtactaacctacagagatgctaagagaaaaaaaagacttgtttctgatctaatatcccagaaaaagtaactcattgctctgttaataatctcacatatacaagtagcttccctcccctctagttttttcttccttttcactgctgttatatttcatcatgataattcagcaggcccaagtaaaggttaaaaataaggtctatgcctagggaaactcagggcttctagtttctcttagaaaagctaagagaagataaggtctgaataatagcagaaaaaccaacatctacaaaacattaaactagtgttatacttgatgataacactatttgatgagtcttagagtccagacacaaagagacaaagctttgaagatgctttttgatctacctaggtggagttggtggtgctgatatttaaattcaggctactgcttcaatctcaattgctttgtaagtgaaaaacatgacccagaggacagcacagactatggccatggctcacatggtttacatccttcactgctcacgtgtttgctgtcaagccatttttacatctaaactaagatgtgcagcatttcacttatttagattcacttaacaaacaaatttttctgctttaaaaatgtcttattgtcccaagtgtactatagcggcatatagagctagctaatctctacaaaccctctgtaggccagtagttctcaaagtgtggtctctggaagagcagtatcagcatcatctgggaacttgtcacagatgcagattctagggaccactccagacctacacaatcagaaactcttgggggagggcccgaaatatctatgttttaccaagcccaccacatgattctgatgtactctaaatactgagaaaacctgttctagacaaatacccaagcaacaactccgcaggcagttaccaagtacggctggctacaactgctccatccgtgcctctttttaaagttcaaactcacaggtgactctaaggttatctacttttactcataagtaaaagccctagactggtgctaatgtcaaaccactggcctccactcaggcctccatcttctcatgccctcttaccagtatttaacttctgaggaagacaagtgatgctaaaacctgaaattccaatgaagccatatgaacagctgttcagttgcacttctaagactttacttagcagtaaattatagctcatgtgcattattttccagataacttagcttatgagtagcttatacaattatgaagatttaatattacagataaaatgtaaactgtttcttta

SEQ ID NO: 1952 - protein, 1339 aa, Homo sapiens
MSARTAPRPQVLLLPLLLVLLAAAPAASKGCVCKDKGQCFCDGAKGEKGEKGFPGPPGSPGQKGFTGPEGLPGPQGPKGLPGPPGFPGPVGPPGPPGFFVRSSRPGLRGAPGWPGLKGSKGERGRPGKDAMGTPGSPGCAGSPGLPGSPGPPGPPGKDVEGDPFCAQCQMTDVCKPRATNPPHSLAISDIVFRKGPPGDHGLPGYLGSPGIPGVDGPKGAQGDPGLKGEKGETLQPEGQVGVPGDPGLRGQPGRKGLDGIPGTPGVKGLPGPKGELALSGEKGDQGPPGDPGSPGSPGPAGPAGPPGYGPQGEPGLQGTQGVPGAPGPPGEAGPRGELSVSTPVPGPPGPPGPPGHPGPQGPPGIPGSLGKCGDPGLPGPDGEPGIPGIGFPGPPGPKGDQGFPGTKGSLGCPGKMGEPGLPGKPGLPGAKGEPAVAMPGGPGTPGFPGERGNSGEHGEIGLPGLPGLPGTPGNEGLDGPRGDPGQPGPPGEQGPPGRCIEGPRGAQGLPGLNGLKGQQGRRGKTGPKGDPGIPGLDRSGFPGETGSPGIPGHQGEMGPLGQRGYPGNPGILGPPGEDGVIGMMGFPGAIGPPGPPGNPGTPGQRGSPGIPGVKGQRGTPGAKGEQGDKGNPGPSEISHVIGDKGEPGLKGFAGNPGEKGNRGVPGMPGLKGLKGLPGPAGPPGPRGDLGSTGNPGEPGLRGIPGSMGNMGMPGSKGKRGTLGFPGRAGRPGLPGIHGLQGDKGEPGYSEGTRPGPPGPTVYRPLKYLHFSGGGDPGLPGDMGKKGEMGQPGPPGHLGPAGPEGAPGSPGSPGLPGPHGDLGFKGIKGLLGPPGIRGPPGLPGFPGSPGPMGIRGDQGRDGIPGPAGEKGETAFFFAGAKGDRGAPGFPGLPGRKGAMGDAGPRGPTGIEGFPGPPGLPGAIIPGQTGNRGPPGSRGSPGAPGPPGPPGSHVIGIKGDKGSMGHPGPKGPPGTAGDMGPPGTPGLPGPRGDPGFQGFPGVKGEKGNPGFLGSIGPPGPIGPKGPPGVRGDPGTLKIISLPGSPGPPGTPGEPGMQGEPGPPGPPGNLGKDGKPGTPGPAGEKGNKGSKGEPDGLPGLKGKRGDSGSPATWTTRGFVFTRHSQTTAIPSCPEGTVPLYSGFSFLFVQGNQRAHGQDLGTLGSCLQRFTTMPFLFCNVNDVCNFASRNDYSYWLSTPALMPMNMAPITGRALEPYISRCTVCEGPAIAIAVHSQTTDIPPCPHGWISLWKGFSFIMFTSAGSEGTGQALASPGSCLEEFRASPFLECHGRGTCNYYSNSYSFWLASLNPERMFRKPIPSTVKAGELEKIISRCQVCMKKRH

SEQ ID NO: 1953 - DNA, 2052 bp, Homo sapiens
cagggggagaagggctttcctggaccccccggttctcctggccagaaaggattcacaggtcctgaaggcttgcctggaccgcagggacccaaggaaaagggagatgaaggcactccaggcccaccagggcccagaggagctcgtggcccacaaggagcccctggatggccaggcctgaaaggaagtaaaggggaacgaggccgcccaggaaaggatgccatggggactcctgggtccccaggttgtgctggttcaccaggtcttccaggatcaccgggacctccaggaccgccagggcctcccggtctcccaggattgccagggttacatggtgtaaaaggaatcccaggtgcccagggtgacccaggacttaaaggagaaaaaggtgaaacacttcagcctgaggggcaagtgggtgtcccaggtgacccggggctcagaggccaacctgggagaaagggcttggatggaattcctggaactccgggagtgaaaggattaccaggacctaaaggcgaactggctctgagtggtgagaaaggggaccaaggtcctccaggggatcctggctcccctgggtccccaggacctgcaggaccagctggaccacctggctacggaccccaaggagaacctggtctccagggcacgcaaggagttcctggagcccccggaccacccggagaagccggttgtgtttcaacaccagttccaggcccaccaggacctccagggccccctggccatcctggcccccaaggtccacctgccatgcctggaggaccaggaacaccaggttttccaggagaaagaggcaattctggggaacatggagaaattggactccctggacttccaggtctccctggaactccaggaaatgaagggcttgatggaccacgaggagatccagggcagcctggaccacctggagaacaaggacccccaggaaggtgcatagagggtcccaggggagcccaaggacttccaggcttaaatggattgaaagggcaacaaggcagaagaggtaaaacggggccaaagggagacccaggaattccaggcttggatagatcaggatttcctggagaaactggatcaccaggaattccaggtcatcaaggtgaaatgggaccactgggtcaaagaggatatccaggaaatccgggaattttagggccaccaggaaatccaggtgagaaaggaaacagaggcgttccagggatgccaggtttaaagggcctcaaaggactacccggaccagcaggaccaccaggttctaaaggaaaaaggggaactttgggattcccaggtcgagcaggaagaccaggcctcccaggtattcatggtctccagggagataagggagagccaggttattcagaaggactgccgggtgatatgggaaagaaaggagaaatggggcaacctggcccacctggacatttggggcctgctggacctgagggagcccctggaagtcctggaagtcctggcctcccaggagccaaaggagacaggggagccccaggttttcctggcctcccgggcagaaaaggggccatgggagatgctggacctcgaggacccacaggcatagaaggattcccagggccaccaggtctgcccggtgcaattatccctggccagacaggaaatcgtggtccaccaggctcaagaggaagcccaggtgcgcctggtccccctggacctccagggagtcatgtaataggcataaaaggagacaaagggtctatgggccaccctggcccaaaaggtccacctggaactgcaggagacatgggaccaccaggtcgtctggtgagtgtacgtggagaccctggcacacttaagattatctcccttccaggaagcccagggccacctggcacacctggagaaccagggatgcagggagaacctgggccaccagggccacctggaaacctaggaccctgtgggccaagaggtaagccaggcaaggatggaaaaccaggaactcctggaccagctggagaaaaaggcaacaaaggttctaaaggagagccaggt

SEQ ID NO: 1954 - protein, 684 aa, Homo sapiens
QGEKGFPGPPGSPGQKGFTGPEGLPGPQGPKEKGDEGTPGPPGPRGARGPQGAPGWPGLKGSKGERGRPGKDAMGTPGSPGCAGSPGLPGSPGPPGPPGPPGLPGLPGLHGVKGIPGAQGDPGLKGEKGETLQPEGQVGVPGDPGLRGQPGRKGLDGIPGTPGVKGLPGPKGELALSGEKGDQGPPGDPGSPGSPGPAGPAGPPGYGPQGEPGLQGTQGVPGAPGPPGEAGCVSTPVPGPPGPPGPPGHPGPQGPPAMPGGPGTPGFPGERGNSGEHGEIGLPGLPGLPGTPGNEGLDGPRGDPGQPGPPGEQGPPGRCIEGPRGAQGLPGLNGLKGQQGRRGKTGPKGDPGIPGLDRSGFPGETGSPGIPGHQGEMGPLGQRGYPGNPGILGPPGNPGEKGNRGVPGMPGLKGLKGLPGPAGPPGSKGKRGTLGFPGRAGRPGLPGIHGLQGDKGEPGYSEGLPGDMGKKGEMGQPGPPGHLGPAGPEGAPGSPGSPGLPGAKGDRGAPGFPGLPGRKGAMGDAGPRGPTGIEGFPGPPGLPGAIIPGQTGNRGPPGSRGSPGAPGPPGPPGSHVIGIKGDKGSMGHPGPKGPPGTAGDMGPPGRLVSVRGDPGTLKIISLPGSPGPPGTPGEPGMQGEPGPPGPPGNLGPCGPRGKPGKDGKPGTPGPAGEKGNKGSKGEPG

SEQ ID NO: 1955 - DNA, 3801 bp, Homo sapiens
aagggtttgccaggccctccaggttttcctgggcctgttggcccacctggtcctccgggattctttgaaaagggagatgaaggcactccaggcccaccagggcccagaggagctcgtggcccacaagcccctggatggccaggcctgaaaggaagtaaaggggaacgaggccgcccaggaaaggatgccatggggactcctgggtccccaggttgtgctggttcaccaggtcttccaggatcaccgggacctccaggaccgccaggtgacatcgtttttcgcaagggtccacctggagatcacggactgccaggctatctagggtctccaggaatcccaggagttgatgggcccaaaggagaaccaggcctcctgtgtacacagtgcccttatatcccagggcctcccggtctcccaggattgccagggttacatggtgtaaaaggaatcccagctggcttgaaaggaagcccagggtccccaggaaatacaggtcttccaggatttccaggtttcccaggtgcccagggtgacccaggacttaaaggagaaaaaggtgaaacacttcagcctgaggggcaagtgggtgtcccaggtgacccggggctcagaggccaacctgggagaaagggcttggatggaattcctggaactccgggagtgaaaggattaccaggacctaaaggcgaactggttggggaccaaggtcctccaggggatcctggctcccctgggtccccaggacctgcaggaccagctggaccacctggctacggaccccaaggagaacctggtctccagggcacgcaaggagttcctggagcccccggaccacccggagaagccggttggggagagctcagtgtttcaacaccagttccaggcccaccaggacctccagggccccctggccatcctggcccccaaggtccacctggtatccctggatccctggggaaatgtggagatcctggtcttccagggcctgatggtgaaccaggaattccaggaattggatttcctgggcctcctggacctaagggtacaaaaggatcactgggttgtcctggaaaaatgggagagcctgggttacctggaaagccaggcctcccaggagccaaggtatgcaaaaattcaagctatcacagaagagaggtagccatgcctggaggaccaggaacaccaggttttccaggagaaagaggcaattctggggaacatggagaaattggactccctggacttccaggtctccctggaactccaggaaatgaagggcttgatggaccacgaggagatccagggcagcctggaccacctggagaacaaggacccccaggaaggtgcatagagggtcccaggggagcccaaggacttccaggcttaaatggattgaaagggcaacaaggcagaagaggtaaaacggggccaaagggagacccaggaattccaggcttggatagatcaggatttcctggagaaactggatcaccaggaattccaggtcatcaaggtgaaatgggaccactgggtcaaagaggatatccaggaaatccgggaattttagggccaccaggtgaagatggagtgattgggatgatgggctttcctggagccattggccctccagggccccctgggaacccaggcacaccagggcagagggggagccctggaattccaggagtaaagggccagagaggaaccccaggagccaagggggaacaaggagataaaggaaatcccgggccttcagagatatcccacgtaataggggacaaaggagaaccaggtctcaaaggattcgcaggaaatccaggtgagaaaggaaacagaggcgttccagggatgccaggtttaaagggcctcaaaggactacccggaccagcaggaccaccaggccccagaggagatttgggcagcactgggaatcctggagaaccaggactgcgtggtataccaggaagcatggggaacatgggcatgccaggttctaaaggaaaaaggggaactttgggattcccaggtcgagcaggaagaccaggcctcccaggtattcatggtctccagggagataagggagagccaggttattcagaaggactgccgggtgatatgggaaagaaaggagaaatggggcaacctggcccacctggacatttggggcctgctggacctgagggagcccctggaagtcctggaagtcctggcctcccaggaatcaaaggcctcctgggccctccaggaatcagaggccctccaggatttccaggatctcctggaccaatgggtataagaggtgaccaaggacgtgatggaattcctggtccagccggagaaaagggagaaacgggagccaaaggagacaggggagccccaggttttcctggcctcccgggcagaaaaggggccatgggagatgctggacctcgaggacccacaggcatagaaggattcccagggccaccaggtctgcccggtgcaattatccctggccagacaggaaatcgtggtccaccaggctcaagaggaagcccaggtgcgcctggtccccctggacctccagggagtcatgtaataggcataaaaggagacaaagggtctatgggccaccctggcccaaaaggtccacctggaactgcaggagacatgggaccaccaggtcgtctgggagcaccaggtactccaggtcttccaggacccagaggtgatcctggattccaggggtttccaggcgtgaaaggagaaaagggtaatcctggatttctaggatccattggacctccaggaccaattgggccaaaaggaccacctggtgtacgtggagaccctggcacacttaagattatctcccttccaggaagcccagggccacctggcacacctggagaaccagggatgcagggagaacctgggccaccagggccacctggaaacctaggaccctgtgggccaagaggtaagccaggcaaggatggaaaaccaggaactcctggaccagctggagaaaaaggcaacaaaggttctaaaggagagccaggaccagctggatcagatggattgccaggtttgaaaggaaaacgtggagacagtggatcacctgcaacctggacaacgagaggctttgtcttcacccgacacagtcaaaccacagcaattccttcatgtccagaggggacagtgccactctacagtgggttttcttttctttttgtacaaggaaatcaacgagcccacggacaagaccttggaactcttggcagctgcctgcagcgatttaccacaatgccattcttattctgcaatgtcaatgatgtatgtaattttgcatctcgaaatgattattcatactggctgtcaacaccagctctgatgccaatgaacatggctcccattactggcagagcccttgagccttatataagcagatgcactgtttgtgaaggtcctgcgatcgccatagccgttcacagccaaaccactgacattcctccatgtcctcacggctggatttctctctggaaaggattttcattcatcatgttcacaagtgcaggttctgagggcaccgggcaagcactggcctcccctggctcctgcctggaagaattccgagccagcccatttctagaatgtcatggaagaggaacgtgcaactactattcaaattcctacagtttctggctggcttcattaaacccagaaagaatgttcagaaagcctattccatcaactgtgaaagctggggaattagaaaaaataataagtcgctgtcaggtgtgcatgaagaaaagacactga

SEQ ID NO: 1956 - protein, 1263 aa, Homo sapiens
KGLPGPPGFPGPVGPPGPPGFFEKGDEGTPGPPGPRGARGPQAPGWPGLKGSKGERGRPGKDAMGTPGSPGCAGSPGLPGSPGPPGPPGDIVFRKGPPGDHGLPGYLGSPGIPGVDGPKGEPGLLCTQCPYIPGPPGLPGLPGLHGVKGIPAGLKGSPGSPGNTGLPGFPGFPGAQGDPGLKGEKGETLQPEGQVGVPGDPGLRGQPGRKGLDGIPGTPGVKGLPGPKGELVGDQGPPGDPGSPGSPGPAGPAGPPGYGPQGEPGLQGTQGVPGAPGPPGEAGWGELSVSTPVPGPPGPPGPPGHPGPQGPPGIPGSLGKCGDPGLPGPDGEPGIPGIGFPGPPGPKGTKGSLGCPGKMGEPGLPGKPGLPGAKVCKNSSYHRREVAMPGGPGTPGFPGERGNSGEHGEIGLPGLPGLPGTPGNEGLDGPRGDPGQPGPPGEQGPPGRCIEGPRGAQGLPGLNGLKGQQGRRGKTGPKGDPGIPGLDRSGFPGETGSPGIPGHQGEMGPLGQRGYPGNPGILGPPGEDGVIGMMGFPGAIGPPGPPGNPGTPGQRGSPGIPGVKGQRGTPGAKGEQGDKGNPGPSEISHVIGDKGEPGLKGFAGNPGEKGNRGVPGMPGLKGLKGLPGPAGPPGPRGDLGSTGNPGEPGLRGIPGSMGNMGMPGSKGKRGTLGFPGRAGRPGLPGIHGLQGDKGEPGYSEGLPGDMGKKGEMGQPGPPGHLGPAGPEGAPGSPGSPGLPGIKGLLGPPGIRGPPGFPGSPGPMGIRGDQGRDGIPGPAGEKGETGAKGDRGAPGFPGLPGRKGAMGDAGPRGPTGIEGFPGPPGLPGAIIPGQTGNRGPPGSRGSPGAPGPPGPPGSHVIGIKGDKGSMGHPGPKGPPGTAGDMGPPGRLGAPGTPGLPGPRGDPGFQGFPGVKGEKGNPGFLGSIGPPGPIGPKGPPGVRGDPGTLKIISLPGSPGPPGTPGEPGMQGEPGPPGPPGNLGPCGPRGKPGKDGKPGTPGPAGEKGNKGSKGEPGPAGSDGLPGLKGKRGDSGSPATWTTRGFVFTRHSQTTAIPSCPEGTVPLYSGFSFLFVQGNQRAHGQDLGTLGSCLQRFTTMPFLFCNVNDVCNFASRNDYSYWLSTPALMPMNMAPITGRALEPYISRCTVCEGPAIAIAVHSQTTDIPPCPHGWISLWKGFSFIMFTSAGSEGTGQALASPGSCLEEFRASPFLECHGRGTCNYYSNSYSFWLASLNPERMFRKPIPSTVKAGELEKIISRCQVCMK

SEQ ID NO: 1957 - DNA, 1488 bp, Homo sapiens
ggcccaccagggcccagaggagctcgtggcccacaaggggatcctggctcccctgggtccccaggacctgcaggaccagctggaccacctggctacggaccccaaggagaacctggtctccagggcacgcaaggagttcctggagcccccggaccacccggagaagccggttggttagttttctttccagtcctgttttccgatggagtggttccaggcccaccaggacctccagggccccctggccatcctggcccccaaggtccacctggagaaagaggcaattctggggaacatggagaaattggactccctggacttccaggtctccctggaactccaggaaatgaagggcttgatggaccacgaggacccccaggaaggtgcatagagggtcccaggggagcccaaggacttccaggcttaaatggattgaaagggcaacaaggatttcctggagaaactggatcaccaggaattccaggtcatcaagggagccctggaattccaggagtaaagggccagagaggaaccccaggagccaagggggaacaaggagataaaggaaatcccgggccttcagagatatcccacgtaataggggacaaaggagaaccaggtctcaaaggaaatccaggtgagaaaggaaacagaggcgttccagggatgccaggtttaaagggcctcaaaggactacccggaccagcaggaccaccaggaagaccaggcctcccaggtattcatggtctccagggagataagggagagccaggactgccgggtgatatgggaaagaaaggagaaatggggcaacctggcccacctggacatttggggcctgctggacctgagggagcccctggaagtcctggaagtcctggcctcccaggtcttccaggatttccaggatctcctggaccaatgggtataagaggtgaccaaggacgtgatggaattcctggtccagccggagaaaagggagaaacgggagccaaaggagacaggggagccccaggttttcctggcctcccgggcagaaaaggggccatgggagatgctggacctcgaggacccacaggcatagaaggattcccagggccaccaggtctgcccggtgcaattatccctggccagacaggaaatcgtggtccaccaggctcaagaggaagcccaggtgcgcctggtccccctggacctccagggagtcatgtaataggcataaaaggagacaaagggtctatgggccaccctggcccaaaaggtccacctggaactgcaggagacatgggaccaccagggccacctggcacacctggagaaccagggatgcagggagaacctgggccaccagggccacctggaaacctaggcaaggatggaaaaccaggaactcctggaccagctggagaaaaaggcaacaaaggttctaaaggagagccagatggattgccaggtttgaaaggaaaacgtggagacagtggatcacct

SEQ ID NO: 1958 - protein, 496 aa, Homo sapiens
GPPGPRGARGPQGDPGSPGSPGPAGPAGPPGYGPQGEPGLQGTQGVPGAPGPPGEAGWLVFFPVLFSDGVVPGPPGPPGPPGHPGPQGPPGERGNSGEHGEIGLPGLPGLPGTPGNEGLDGPRGPPGRCIEGPRGAQGLPGLNGLKGQQGFPGETGSPGIPGHQGSPGIPGVKGQRGTPGAKGEQGDKGNPGPSEISHVIGDKGEPGLKGNPGEKGNRGVPGMPGLKGLKGLPGPAGPPGRPGLPGIHGLQGDKGEPGLPGDMGKKGEMGQPGPPGHLGPAGPEGAPGSPGSPGLPGLPGFPGSPGPMGIRGDQGRDGIPGPAGEKGETGAKGDRGAPGFPGLPGRKGAMGDAGPRGPTGIEGFPGPPGLPGAIIPGQTGNRGPPGSRGSPGAPGPPGPPGSHVIGIKGDKGSMGHPGPKGPPGTAGDMGPPGPPGTPGEPGMQGEPGPPGPPGNLGKDGKPGTPGPAGEKGNKGSKGEPDGLPGLKGKRGDSGSP

SEQ ID NO: 1959 - DNA, 2694 bp, Homo sapiens
atggggactcctgggtccccaggttgtgctggttcaccaggtcttccaggatcaccgggacctccaggaccgccaggtgacatcgtttttcgcaagggtccacctggagatcacggactgccaggctatctagggtctccaggaatcccaggagttgatgggcccaaaggtcctccaggggatcctggctcccctgggtccccaggacctgcaggaccagctggaccacctggctacggaccccaaggagaacctggtctccagggcacgcaaggagttcctggagcccccggaccacccggagaagccggttgtgtttcaacaccagttccaggcccaccaggacctccagggccccctggccatcctggcccccaaggtccacctggtatccctggatccctggggaaatgtggagatcctggtcttccagggcctgatggtgaaccaggaattccaggaattggatttcctgggcctcctggacctaagggttttccaggagaaagaggcaattctggggaacatggagaaattggactccctggacttccaggtctccctggaactccaggaaatgaagggcttgatggaccacgaggatttcctggagaaactggatcaccaggaattccaggtcatcaaggtgaaatgggaccactgggtcaaagaggatatccaggaaatccgggaattttagggccaccaggtgaagatggagtgattgggatgatgggctttcctggagccattggccctccagggccccctgggaacccaggcacaccagggcagaggggagtaaagggccagagaggaaccccaggagccaagggggaacaaggagataaaggaaatcccgggccttcagagatatcccacgtaataggggacaaaggagaaccaggtctcaaaggattcgcaggaaatccaggtgagaaaggaaacagaggcgttccagggatgccaggtttaaagggcctcaaaggactacccggaccagcaggaccaccagatttgggcagcactgggaatcctggagaaccaggactgcgtggtataccaggaagcatggggaacatgggcatgccaggactgccgggtgatatgggaaagaaaggagaaatggggcaacctggcccacctggacatttggggcctgctggacctgagggagcccctggaagtcctggaagtcctggcctcccaggtcttccaggatttccaggatctcctggaccaatgggtataagaggagccaaaggagacaggggagccccaggttttcctggcctcccgggcagaaaaggggccatgggagatgctggacctcgaggacccacaggcatagaaggattcccagggccaccaggtctgcccggtgcaattatccctggccagacaggaaatcgtggtccaccaggctcaagaggaagcccaggtgcgcctggtccccctggacctccagggagtcatgtaataggcataaaaggagacaaagggtctatgggccaccctggcccaaaaggtccacctggaactgcaggagacatgggaccaccaggtcgtctgggagcaccaggtactccaggtcttccaggacccagaggtgatcctggattccaggggtttccaggcgtgaaaggagaaaagggtaatcctggatttctaggatccattggacctccaggaccaattgggccaaaaggaccacctggtgtacgtggagaccctggcacacttaagattatctcccttccaggaagcccagggccacctggcacacctggagaaccagggatgcagggagaacctgggccaccagggccacctggaaacctaggaccctgtgggccaagaggtaagccaggcaaggatggaaaaccaggaactcctggaccagctggagaaaaaggcaacaaaggttctaaaggagagccaggaccagctggatcagatggattgccaggtttgaaaggaaaacgtggagacagtggatcacctgcaacctggacaacgagaggctttgtcttcacccgacacagtcaaaccacagcaattccttcatgtccagaggggacagtgccactctacagtgggttttcttttctttttgtacaaggaaatcaacgagcccacggacaagaccttggaactcttggcagctgcctgcagcgatttaccacaatgccattcttattctgcaatgtcaatgatgtatgtaattttgcatctcgaaatgattattcatactggctgtcaacaccagctctgatgccaatgaacatggctcccattactggcagagcccttgagccttatataagcagatgcactgtttgtgaaggtcctgcgatcgccatagccgttcacagccaaaccactgacattcctccatgtcctcacggctggatttctctctggaaaggattttcattcatcatgttcacaagtgcaggttctgagggcaccgggcaagcactggcctcccctggctcctgcctggaagaattccgagccagcccatttctagaatgtcatggaagaggaacgtgcaactactattcaaattcctacagtttctggctggcttcattaaacccagaaagaatgttcagaaagcctattccatcaactgtgaaagctggggaattagaaaaaataataagtcgctgtcaggtgtgcatgaagaaa

SEQ ID NO: 1960 - protein, 898 aa, Homo sapiens
MGTPGSPGCAGSPGLPGSPGPPGPPGDIVFRKGPPGDHGLPGYLGSPGIPGVDGPKGPPGDPGSPGSPGPAGPAGPPGYGPQGEPGLQGTQGVPGAPGPPGEAGCVSTPVPGPPGPPGPPGHPGPQGPPGIPGSLGKCGDPGLPGPDGEPGIPGIGFPGPPGPKGFPGERGNSGEHGEIGLPGLPGLPGTPGNEGLDGPRGFPGETGSPGIPGHQGEMGPLGQRGYPGNPGILGPPGEDGVIGMMGFPGAIGPPGPPGNPGTPGQRGVKGQRGTPGAKGEQGDKGNPGPSEISHVIGDKGEPGLKGFAGNPGEKGNRGVPGMPGLKGLKGLPGPAGPPDLGSTGNPGEPGLRGIPGSMGNMGMPGLPGDMGKKGEMGQPGPPGHLGPAGPEGAPGSPGSPGLPGLPGFPGSPGPMGIRGAKGDRGAPGFPGLPGRKGAMGDAGPRGPTGIEGFPGPPGLPGAIIPGQTGNRGPPGSRGSPGAPGPPGPPGSHVIGIKGDKGSMGHPGPKGPPGTAGDMGPPGRLGAPGTPGLPGPRGDPGFQGFPGVKGEKGNPGFLGSIGPPGPIGPKGPPGVRGDPGTLKIISLPGSPGPPGTPGEPGMQGEPGPPGPPGNLGPCGPRGKPGKDGKPGTPGPAGEKGNKGSKGEPGPAGSDGLPGLKGKRGDSGSPATWTTRGFVFTRHSQTTAIPSCPEGTVPLYSGFSFLFVQGNQRAHGQDLGTLGSCLQRFTTMPFLFCNVNDVCNFASRNDYSYWLSTPALMPMNMAPITGRALEPYISRCTVCEGPAIAIAVHSQTTDIPPCPHGWISLWKGFSFIMFTSAGSEGTGQALASPGSCLEEFRASPFLECHGRGTCNYYSNSYSFWLASLNPERMFRKPIPSTVKAGELEKIISRCQVCMKK

SEQ ID NO: 1961 - DNA, 2880 bp, Homo sapiens
cctgggtccccaggttgtgctggttcaccaggtcttccaggatcaccgggacctccaggaccgccaggtgacccggggctcagaggccaacctgggagaaagggcttggatggaattcctggaactccgggagtgaaaggattaccaggacctaaaggcgaactggctctgagtggtgagaaaggggaccaaggtcctccaggggatcctggctcccctgggtccccaggacctgcaggaccagctggaccacctggctacggaccccaaggagaacctggtctccagggcacgcaaggagttcctggagcccccggaccacccggagaagccggcccaccaggacctccagggccccctggccatcctggcccccaaggtccacctggtatccctggatccctggggaaatgtggagatcctggtcttccagggcctgatggtgaaccaggaattccaggaattggatttcctgggcctcctggacctaagggaacaccaggttttccaggagaaagaggcaattctggggaacatggagaaattggactccctggacttccaggtctccctggaactccaggaaatgaagggcttgatggaccacgaggagatccagggcagcctggaccacctggagaacaaggacccccaggaaggtgcatagagggtcccaggggagcccaaggacttccaggcttaaatggattgaaagggcaacaaggcagaagaggtaaaacggggccaaagggagacccaggaattccaggcttggatagatcaggatttcctggagaaactggatcaccaggaattccaggtcatcaaggtgaaatgggaccactgggtcaaagaggatatccaggaaatccgggaattttagggccaccaggtgaagatggagtgattgggatgatgggctttcctggagccattggccctccagggccccctgggaacccaggcacaccagggcagagggggagccctggaattccaggagtaaagggccagagaggaaccccaggagccaagggggaacaaggagataaaggaaatcccgggccttcagagatatcccacgtaataggggacaaaggagaaccaggtctcaaaggattcgcaggaaatccaggtgagaaaggaaacagaggcgttccagggatgccaggtttaaagggcctcaaaggactacccggaccagcaggaccaccaggttctaaaggaaaaaggggaactttgggattcccaggtcgagcaggaagaccaggcctcccaggtattcatggtctccagggagataagggagagccaggttattcagaaggactgccgggtgatatgggaaagaaaggagaaatggggcaacctggcccacctggacatttggggcctgctggacctgagggagcccctggaagtcctggaagtcctggcctcccaggagccaaaggagacaggggagccccaggttttcctggcctcccgggcagaaaaggggccatgggagatgctggacctcgaggacccacaggcatagaaggattcccagggccaccaggtctgcccggtgcaattatccctggccagacaggaaatcgtggtccaccaggctcaagaggaagcccaggtgcgcctggtccccctggacctccagggagtcatgtaataggcataaaaggagacaaagggtctatgggccaccctggcccaaaaggtccacctggaactgcaggagacatgggaccaccaggtcgtctgggagcaccaggtactccaggtcttccaggacccagaggtgatcctggattccaggggtttccaggcgtgaaaggagaaaagggtaatcctggatttctaggatccattggacctccaggaccaattgggccaaaaggaccacctggtgtacgtggagaccctggcacacttaagattatctcccttccaggaagcccagggccacctggcacacctggagaaccagggatgcagggagaacctgggccaccagggccacctggaaacctaggaccctgtgggccaagaggtaagccaggcaaggatggaaaaccaggaactcctggaccagctggagaaaaaggcaacaaaggttctaaaggagagccaggaccagctggatcagatggattgccaggtttgaaaggaaaacgtggagacagtggatcacctgcaacctggacaacgagaggctttgtcttcacccgacacagtcaaaccacagcaattccttcatgtccagaggggacagtgccactctacagtgggttttcttttctttttgtacaaggaaatcaacgagcccacggacaagaccttggaactcttggcagctgcctgcagcgatttaccacaatgccattcttattctgcaatgtcaatgatgtatgtaattttgcatctcgaaatgattattcatactggctgtcaacaccagctctgatgccaatgaacatggctcccattactggcagagcccttgagccttatataagcagatgcactgtttgtgaaggtcctgcgatcgccatagccgttcacagccaaaccactgacattcctccatgtcctcacggctggatttctctctggaaaggattttcattcatcatgttcacaagtgcaggttctgagggcaccgggcaagcactggcctcccctggctcctgcctggaagaattccgagccagcccatttctagaatgtcatggaagaggaacgtgcaactactattcaaattcctacagtttctggctggcttcattaaacccagaaagaatgttcagaaagcctattccatcaactgtgaaagctggggaattagaaaaaataataagtcgctgtcaggtgtgcatgaag

SEQ ID NO: 1962 - protein, 960 aa, Homo sapiens
PGSPGCAGSPGLPGSPGPPGPPGDPGLRGQPGRKGLDGIPGTPGVKGLPGPKGELALSGEKGDQGPPGDPGSPGSPGPAGPAGPPGYGPQGEPGLQGTQGVPGAPGPPGEAGPPGPPGPPGHPGPQGPPGIPGSLGKCGDPGLPGPDGEPGIPGIGFPGPPGPKGTPGFPGERGNSGEHGEIGLPGLPGLPGTPGNEGLDGPRGDPGQPGPPGEQGPPGRCIEGPRGAQGLPGLNGLKGQQGRRGKTGPKGDPGIPGLDRSGFPGETGSPGIPGHQGEMGPLGQRGYPGNPGILGPPGEDGVIGMMGFPGAIGPPGPPGNPGTPGQRGSPGIPGVKGQRGTPGAKGEQGDKGNPGPSEISHVIGDKGEPGLKGFAGNPGEKGNRGVPGMPGLKGLKGLPGPAGPPGSKGKRGTLGFPGRAGRPGLPGIHGLQGDKGEPGYSEGLPGDMGKKGEMGQPGPPGHLGPAGPEGAPGSPGSPGLPGAKGDRGAPGFPGLPGRKGAMGDAGPRGPTGIEGFPGPPGLPGAIIPGQTGNRGPPGSRGSPGAPGPPGPPGSHVIGIKGDKGSMGHPGPKGPPGTAGDMGPPGRLGAPGTPGLPGPRGDPGFQGFPGVKGEKGNPGFLGSIGPPGPIGPKGPPGVRGDPGTLKIISLPGSPGPPGTPGEPGMQGEPGPPGPPGNLGPCGPRGKPGKDGKPGTPGPAGEKGNKGSKGEPGPAGSDGLPGLKGKRGDSGSPATWTTRGFVFTRHSQTTAIPSCPEGTVPLYSGFSFLFVQGNQRAHGQDLGTLGSCLQRFTTMPFLFCNVNDVCNFASRNDYSYWLSTPALMPMNMAPITGRALEPYISRCTVCEGPAIAIAVHSQTTDIPPCPHGWISLWKGFSFIMFTSAGSEGTGQALASPGSCLEEFRASPFLECHGRGTCNYYSNSYSFWLASLNPERMFRKPIPSTVKAGELEKIISRCQVCMK

SEQ ID NO: 1963 - DNA, 5485 bp, Homo sapiens
ctgtggcttgccccagagctgatccttgtctttgtccacttctcagcgaggatggcacttcagggagcccttcccttactatcgcagagagagcaggccctccccagtcatgtccaacccagaactctgttttgttttcttcatagccctagcatcacagaaaatcaccctgtgcattcatggatgtccacgggggcaagggctttgtgttgcttaacccagcatcctgaaccgtgtttgttgaatgaatacagaaccccgtttgctctgggagagcacagaaaacagtcttctatcatatatcatagccagctgcaaacagcagatggcttcccatatcccagagagtaagaaccagagagagagagaaagagagagagtttgggtctttctcctctgtgcctgctctctccagagaaactggaggggtagcagttagcattcccccgctggttccaccaagcacagtcaaggtctctaggacatggccacccctcacctgtggaagcggtcctgctggggtgggtgggtgttagttggttctggtttgggtcagagacacccagtggcccaggtgggcgtggggccagggcgcagacgagaaggggcacgagggctccgctccgaggacccagcggcaagcaccggtcccgggcgcgccccagcccacccactcgcgtgcccacggcggcattattccctataaggatctgaacgatccgggggcggccccgccccgttaccccttgcccccggccccgccccctttttggagggccgatgaggtaatgcggctctgccattggtctgagggggcgggccccaacagcccgaggcggggtccccgggggcccagcgctatatcactcggccgcccaggcagcggcgcagagcgggcagcaggcaggcggcgggcgctcagacggcttctcctcctcctcttgctcctccagctcctgctccttcgccgggaggccgcccgccgagtcctgcgccagcgccgaggcagcctcgctgcgccccatcccgtcccgccgggcactcggagggcagcgcgccggaggccaaggttgccccgcacggcccggcgggcgagcgagctcgggctgcagcagccccgccggcggcgcgcacggcaactttggagaggcgagcagcagccccggcagcggcggcagcagcggcaatgaccccttggctcgggctcatcgtgctcctgggcagctggagcctgggggactggggcgccgaggcgtgcacatgctcgcccagccacccccaggacgccttctgcaactccgacatcgtgatccgggccaaggtggtggggaagaagctggtaaaggaggggcccttcggcacgctggtctacaccatcaagcagatgaagatgtaccgaggcttcaccaagatgccccatgtgcagtacatccatacggaagcttccgagagtctctgtggccttaagctggaggtcaacaagtaccagtacctgctgacaggtcgcgtctatgatggcaagatgtacacggggctgtgcaacttcgtggagaggtgggaccagctcaccctctcccagcgcaaggggctgaactatcggtatcacctgggttgtaactgcaagatcaagtcctgctactacctgccttgctttgtgacttccaagaacgagtgtctctggaccgacatgctctccaatttcggttaccctggctaccagtccaaacactacgcctgcatccggcagaagggcggctactgcagctggtaccgaggatgggcccccccggataaaagcatcatcaatgccacagacccctgagcgccagaccctgccccacctcacttccctcccttcccgctgagcttcccttggacactaactcttcccagatgatgacaatgaaattagtgcctgttttcttgcaaatttagcacttggaacatttaaagaaaggtctatgctgtcatatggggtttattgggaactatcctcctggccccaccctgccccttctttttggttttgacatcattcatttccacctgggaatttctggtgccatgccagaaagaatgaggaacctgtattcctcttcttcgtgataatataatctctatttttttaggaaaacaaaaatgaaaaactactccatttgaggattgtaattcccacccctcttgcttcttccccacctcaccatctcccagaccctcttccctttgcccttctcctccaatacataaaggacacagacaaggaacttgctgaaaggccaaccatttcaggatcagtcaaaggcagcaagcagatagactcaaggtgtgtgaaagatgttatacaccaggagctgccactgcatgtcccaaccagactgtgtctgtctgtgtctgcatgtaagagtgagggagggaaggaaggaactacaagagagtcggagatgatgcagcacacacacaattccccagcccagtgatgcttgtgttgaccagatgttcctgagtctggagcaagcacccaggccagaataacagagctttcttagttggtgaagacttaaacatctgcctgaggtcaggaggcaatttgcctgccttgtacaaaagctcaggtgaaagactgagatgaatgtctttcctctccctgcctcccaccagacttcctcctggaaaacgctttggtagatttggccaggagctttcttttatgtaaattggataaatacacacaccatacactatccacagatatagccaagtagatttgggtagaggatactatttccagaatagtgtttagctcacctagggggatatgtttgtatacacatttgcatatacccacatggggacataagctaatttttttacaggacacagaattctgttcaatgctgttaaatatgccaatagtttaatctcttctattttgttgtcgttgcttgtttgaagaaaatcatgacattccaagttgacatttttttttcattttaattaaaatttgaaattctgaacaccgtcagcaccctctcttccctatcatgggtcatctgacccctgtccgtctccttgtccctgcttcatgtttgggggcctttctttaactgccttcctggcttagctcagatggcagatgagagtgtagtcaagggcctgggcacaggagggagagctgcagagtgtcctgcctgccttggctggagggacacctctcctgggtgtggagacagcttggttccctttccctagctccctggtgggtgaatgccacctcctgagatcctcacctcttggaattaaaattgttggtcactggggaaagcctgagtttgcaaccagttgtagggtttctgttgtgtttttttttttttttttgaaataaaactataatataaattctcctattaaataaaattattttaagttttagtgtcaaaagtgagatgctgagagtaggtgataatgtatattttacagagtgggggttggcaggatggtgacattgaacatgattgctctctgtctcttttttcagcttatgggtatttatcttctattagtatttgtatcttcagttcattccactttaggaaacagagctgccaattgaaacagaagaagaaaaaaaaaaaaagcagcagacaacacactgtagagtcttgcacacacacaagtgcccaggcaaggtgcttggcagaaccgcagagtgggaagagagtaccggcatcgggtttccttgggatcaatttcattaccgtgtacctttcccattgtggtcatgccatttggcagggggagaatgggaggcttggccttctttgtgaggcagtgtgagcagaagctgatgccagcatgtcactggttttgaagggatgagcccagacttgatgttttgggattgtccttattttaacctcaaggtctcgcatggtggggcccctgaccaacctacacaagttccctcccacaagtggacatcagtgtcttctctgtgaggcatctggccattcgcactccctggtgtggtcagcctctctcacacaaggaggaacttgggtgaaggctgagtgtgaggcacctgaagtttccctgcggagtcgataaattagcagaaccacatccccatctgttaggccttggtgaggaggccctgggcaaagaagggtctttcgcaaagcgatgtcagagggcggttttgagctttctataagctatagctttgtttatttcacccgttcacttactgtataatttaaaatcatttatgtagctgagacacttctgtatttcaatcatatcatgaacattttattttgctaaatcttgtgtcatgtgtaggctgtaatatgtgtacattgtgtttaagagaaaaatgaaacccacatgccgccattttcctgaatcaaattctgcagtggaatggagaggaaaatacttctaggcaagcagctagactggtgaattgggggaaatagaaggaactagtaactgagactcctccagcctcctccctattggaatcccaatggctcctggagtaggaaaaaagtttaaactacattcatgttcttgttctgtgtcactcggccctgggtagtctaccatttacttcaccccaagtcctgctgcccatccagttgggaagccatgattttcctaagaatccagggccatgggagatacaattccaagttctcgcttcctcctttgggcatctcttctgcctcccaatcaaggaagctccatgctcaggctctcagctctcgggccagtgctctgctctgtccagggtaggtaatactgggagactcctgtcttttaccctcccctcgttccagacctgcctcatggtggcaacatggttcttgaacaattaaagaaacaaatgactttttggaatagccctgtctagggcaaactgtggcccccaggagacactacccttccatgccccagacctctgtcttgcatgtgacaattgacaatctggactaccccaagatggcacccaagtgtttggcttctggctacctaaggttaacatgtcactagagtatttttatgagagacaaacattataaaaatctgatggcaaaagcaaaacaaaatggaaagtaggggaggtggatgtgacaacaacttccaaattggctctttggaggcgagaggaaggggagaacttggagaatagtttttgctttgggggtagaggcttcttagattctcccagcatccgcctttccctttagccagtctgctgtcctgaaacccagaagtgatggagagaaaccaacaagagatctcgaaccctgtctagaaggaatgtatttgttgctaaatttcgtagcactgtttacagttttcctccatgttatttatgaattttatattccgtgaatgtatattgtcttgtaatgttgcataatgttcactttttatagtgtgtcctttattctaaacagtaaagtggttttatttctatcac

SEQ ID NO: 1964 - protein, 211 aa, Homo sapiens
MTPWLGLIVLLGSWSLGDWGAEACTCSPSHPQDAFCNSDIVIRAKVVGKKLVKEGPFGTLVYTIKQMKMYRGFTKMPHVQYIHTEASESLCGLKLEVNKYQYLLTGRVYDGKMYTGLCNFVERWDQLTLSQRKGLNYRYHLGCNCKIKSCYYLPCFVTSKNECLWTDMLSNFGYPGYQSKHYACIRQKGGYCSWYRGWAPPDKSIINATDP

SEQ ID NO: 1965 - DNA, 3371 bp, Homo sapiens
gcggagccagcccctcccctacccggagcagcccgctggggccgtcccgagcggcgacacactaggagtcccggccggccagccagggcagccgcggtcccgggactcggccgtgagtgctgcgggacggatggtggcggcggggcgcgggccagcgcgggcgccgtgagccggagctgcgcgcggggcatgcggctgcggcccccggccctcggcccccgcgctccggccccagccccggccgccggcccccgcggagtgcagcgaccgcgccgccgctgagggaggcgccccaccatgccgcgggccccggcgccgctgtacgcctgcctcctggggctctgcgcgctcctgccccggctcgcaggtctcaacatatgcactagtggaagtgccacctcatgtgaagaatgtctgctaatccacccaaaatgtgcctggtgctccaaagaggacttcggaagcccacggtccatcacctctcggtgtgatctgagggcaaaccttgtcaaaaatggctgtggaggtgagatagagagcccagccagcagcttccatgtcctgaggagcctgcccctcagcagcaagggttcgggctctgcaggctgggacgtcattcagatgacaccacaggagattgccgtgaacctccggcccggtgacaagaccaccttccagctacaggttcgccaggtggaggactatcctgtggacctgtactacctgatggacctctccctgtccatgaaggatgacttggacaatatccggagcctgggcaccaaactcgcggaggagatgaggaagctcaccagcaacttccggttgggatttgggtcttttgttgataaggacatctctcctttctcctacacggcaccgaggtaccagaccaatccgtgcattggttacaagttgtttccaaattgcgtcccctcctttgggttccgccatctgctgcctctcacagacagagtggacagcttcaatgaggaagttcggaaacagagggtgtcccggaaccgagatgcccctgaggggggctttgatgcagtactccaggcagccgtctgcaaggagaagattggctggcgaaaggatgcactgcatttgctggtgttcacaacagatgatgtgccccacatcgcattggatggaaaattgggaggcctggtgcagccacacgatggccagtgccacctgaacgaggccaacgagtacactgcatccaaccagatggactatccatcccttgccttgcttggagagaaattggcagagaacaacatcaacctcatctttgcagtgacaaaaaaccattatatgctgtacaagaattttacagccctgatacctggaacaacggtggagattttagatggagactccaaaaatattattcaactgattattaatgcatacaatagtatccggtctaaagtggagttgtcagtctgggatcagcctgaggatcttaatctcttctttactgctacctgccaagatggggtatcctatcctggtcagaggaagtgtgagggtctgaagattggggacacggcatcttttgaagtatcattggaggcccgaagctgtcccagcagacacacggagcatgtgtttgccctgcggccggtgggattccgggacagcctggaggtgggggtcacctacaactgcacgtgcggctgcagcgtggggctggaacccaacagcgccaggtgcaacgggagcgggacctatgtctgcggcctgtgtgagtgcagccccggctacctgggcaccaggtgcgagtgccaggatggggagaaccagagcgtgtaccagaacctgtgccgggaggcagagggcaagccactgtgcagcgggcgtggggactgcagctgcaaccagtgctcctgcttcgagagcgagtttggcaagatctatgggcctttctgtgagtgcgacaacttctcctgtgccaggaacaagggagtcctctgctcaggccatggcgagtgtcactgcggggaatgcaagtgccatgcaggttacatcggggacaactgtaactgctcgacagacatcagcacatgccggggcagagatggccagatctgcagcgagcgtgggcactgtctctgtgggcagtgccaatgcacggagccgggggcctttggggagatgtgtgagaagtgccccacctgcccggatgcatgcagcaccaagagagattgcgtcgagtgcctgctgctccactctgggaaacctgacaaccagacctgccacagcctatgcagggatgaggtgatcacatgggtggacaccatcgtgaaagatgaccaggaggctgtgctatgtttctacaaaaccgccaaggactgcgtcatgatgttcacctatgtggagctccccagtgggaagtccaacctgaccgtcctcagggagccagagtgtggaaacacccccaacgccatgaccatcctcctggctgtggtcggtagcatcctccttgttgggcttgcactcctggctatctggaagctgcttgtcaccatccacgaccggagggagtttgcaaagtttcagagcgagcgatccagggcccgctatgaaatggcttcaaatccattatacagaaagcctatctccacgcacactgtggacttcaccttcaacaagttcaacaaatcctacaatggcactgtggactgatgtttccttctccgaggggctggagcggggatctgatgaaaaggtcagactgaaacgccttgcacggctgctcggcttgatcacagctccctaggtaggcaccacagagaagaccttctagtgagcctgggccaggagcccacagtgcctgtacaggaaggtgcctggccatgtcacctggctgctaggccagagccatgccaggctgcgtccctccgagcttgggataaagcaaggggaccttggcgctctcagctttccctgccacatccagcttgttgtcccaatgaaatactgagatgctgggctgtctctcccttccaggaatgctgggcccccagcctggccagacaagaagactgtcaggaagggtcggagtctgtaaaaccagcatacagtttggcttttttcacattgatcatttttatatgaaataaaaagatcctgcatttatggtgtagttctgagtcctgagacttttctgcgtgatggctatgccttgcacacaggtgttggtgatggggctgttgagatgcctgttgaaggtacatcgtttgcaaatgtcagtttcctctcctgtccgtgtttgtttagtacttttataatgaaaagaaacaagattgtttgggattggaagtaaagattaaaaccaaaagaatttgtgtttgtctgat

SEQ ID NO: 1966 - protein, 799 aa, Homo sapiens
MPRAPAPLYACLLGLCALLPRLAGLNICTSGSATSCEECLLIHPKCAWCSKEDFGSPRSITSRCDLRANLVKNGCGGEIESPASSFHVLRSLPLSSKGSGSAGWDVIQMTPQEIAVNLRPGDKTTFQLQVRQVEDYPVDLYYLMDLSLSMKDDLDNIRSLGTKLAEEMRKLTSNFRLGFGSFVDKDISPFSYTAPRYQTNPCIGYKLFPNCVPSFGFRHLLPLTDRVDSFNEEVRKQRVSRNRDAPEGGFDAVLQAAVCKEKIGWRKDALHLLVFTTDDVPHIALDGKLGGLVQPHDGQCHLNEANEYTASNQMDYPSLALLGEKLAENNINLIFAVTKNHYMLYKNFTALIPGTTVEILDGDSKNIIQLIINAYNSIRSKVELSVWDQPEDLNLFFTATCQDGVSYPGQRKCEGLKIGDTASFEVSLEARSCPSRHTEHVFALRPVGFRDSLEVGVTYNCTCGCSVGLEPNSARCNGSGTYVCGLCECSPGYLGTRCECQDGENQSVYQNLCREAEGKPLCSGRGDCSCNQCSCFESEFGKIYGPFCECDNFSCARNKGVLCSGHGECHCGECKCHAGYIGDNCNCSTDISTCRGRDGQICSERGHCLCGQCQCTEPGAFGEMCEKCPTCPDACSTKRDCVECLLLHSGKPDNQTCHSLCRDEVITWVDTIVKDDQEAVLCFYKTAKDCVMMFTYVELPSGKSNLTVLREPECGNTPNAMTILLAVVGSILLVGLALLAIWKLLVTIHDRREFAKFQSERSRARYEMASNPLYRKPISTHTVDFTFNKFNKSYNGTVD

SEQ ID NO: 1967 - DNA, 3297 bp, Homo sapiens
gcattcctttggcacaggatgaagaccagctcagctcttcagttgttgatcattgtctattgttctccaaacagtaaaccagtatttcacactgagattgtcggctgcgggtatattccaattccccgtctcctcatgaatatgaagtgaagggctctgaccctggaagtggttctaagcagggcaaaatggggtctcggaagtgtggaggctgcctaagttgtttgctgattccgcttgcactttggagtataatcgtgaacatattattgtatttcccgaatgggcaaacttcctatgcatccagcaataaactcaccaactacgtgtggtattttgaaggaatctgtttctcaggcatcatgatgcttatagtaacaacagttcttctggtactggagaataataacaactataaatgttgccagagtgaaaactgcagcaaaaaatatgtgacactgctgtcaattatcttttcttccctcggaattgctttttctggatactgcctggtcatctctgccttgggtcttgtccaagggccatattgccgcacccttgatggctgggagtatgcttttgaaggcactgctggacgtttccttacagattctagcatatggattcagtgcctggaacctgcacatgttgtggagtggaacatcattttattttccattctcataaccctcagtgggcttcaagtgatcatctgcctcatcagagtagtcatgcaactatccaagatactgtgtggaagctattcagtgatcttccagcctggaatcatttgaataaggacaaaatgttttccattatcaagacatggccatctatctaaatattatatcaactgtgtagacttgagggcaatattgaaatgatggtgctttctgcatttggtgtttatttgtaaaaaatttgcagtcctcactgcacatgcaagtataccacccttccatttagtatgttttttaagtaatatgcatcagaaacttcagaaatacttctgccctttgatcaaacaaatccatttccaagaatctgtactagggaagtaaataagaatatgagagaaacctttatgcaaatatgtatattgcaacattatttaatattctggaaaattggaaacaccccaaaattctaaactcagaggaaggattaagtaaagagtggtacatactgtaaatgttttctgatattaaaaaaaaaattaaataaaaaataaagagtactacatggttgtaaaattacagtcattacaaatgatgtttttaaaattatgaataatgctacatcaaaaagcaggttacaaattcatgtttactatataactatttaaagcaaatgaaacactaatagtcaaagtttaggatgaaaactaaatctaaaaggaaatataacaaaatgccaattatgcttggtttggggcattgatgacccttcttcccacttttctatattttccaagatttctttattgaatatgttttactataaatattttctaaactcatattttcactattaaaatttttttatttttccaaactttaaggcatatgctctttccacattcctcaacattatttgcaaacatcatgaaatgacacttccatcaacattcaatgaggaaagtagtgatatagatgagccaaaaagagttttatataaacttatacaatctaaactcttgctcttcctttctgactcctgagggtgagtgtgatggactagaagaggtagccttaaaataagtgagcagctagggaacatgctcaatgggcaagagaaaatgaccactgaccagtcaatacctgtgtcagggggagttaccagtacctatatttatttttaaagtaattaaaaagtagaacacttacaaattttccacctatacatgccatgtcttcctcggggacagtagccacatcttatatatttcccaccatgcataggacccagcacacagtgaagccagtaggcactcagtgttgaatgctcataccaggttttctgcttcctgtagttaccctgctgagcactgcttccatcacaggtgcactgggcctcaacacttctgccatttccccatttgtctcctccatggacactgtcaacaatggtctgtcaacacctgctctgtgccaaagccagggagtaggctggggggatacggaagagaatatctttctccttgatgcctgctgtgccaacagccccctttaagccttgttcacagcctttgctgaaacaagcatcttgaaagcaagccatgttatacaccgcatgaccttcatgctctgggcccagctgactgaactggggcaggccccagagtcatgggcagcctattgtcttgctaatggcctctgacttagcctggagtaaaacactgtccaaacaagactggtggttattcaagcataagaatttgaactaggaagccaagaatgaagcaaccggaccattaccatcaaaaaatgattaaaggatgaagaaggaagccaacattcagagagtatctggttcatgttaataatggtatcatattaaaaggaagatacatgaacttctactccaaaagctcctaaaactgcctttgcccacaatgaacagtgtaccctaggcctggtttctgttcttggattcctagatagtctttcttctttgtcactgtgctgatcatttcagtaaacccccgactaaatcagtgcagctctgtttattgcaactaaaacgatccaaatgaagtctcccttttctagatgttgggttggagggatgctaagacaaagatgcttaggctccagagttttacagagcttcattcaataacactctactttccaaagaacttaaatatgaggtctgaaggacttggaccaagaggcaaacccaagctacagacaccatgttgtactcagagtgacctctcccctctgacagcccaggatttctctatcaagtccataagctagtcatatctaggaccatcttgttaaaaattctctcaaagtctcctcagccctcttgtaaacagacttctggaaggtccacttcatcagtttgttatatactttcagactgtctatctcttgtttagattcagcatggcaccgtacgttgaatggactgttaatagatgtttgctgaatgactccaccacagcattggacacatcaggggtacagccaaatgcagcatgatacctctatcaggaaaattaaattttaacacagccaccaaatattctatatttgaagagtatatgctaatcatgcaattttaagt

SEQ ID NO: 1968 - protein, 201 aa, Homo sapiens
MGSRKCGGCLSCLLIPLALWSIIVNILLYFPNGQTSYASSNKLTNYVWYFEGICFSGIMMLIVTTVLLVLENNNNYKCCQSENCSKKYVTLLSIIFSSLGIAFSGYCLVISALGLVQGPYCRTLDGWEYAFEGTAGRFLTDSSIWIQCLEPAHVVEWNIILFSILITLSGLQVIICLIRVVMQLSKILCGSYSVIFQPGII

SEQ ID NO: 1969 - DNA, 1665 bp, Homo sapiens
ctcttcgcaccacagccagagcctgccattaggaccaatgaaagcaaagtacctcatcccctcagtgactaagaatcgcagtatttaagaggtagcaggaatgggctgagagtggtgtttgctttctccaccagaagggcacactttcatctaatttggggtatcactgagctgaagacaaagagaagggggagaaaacctagcagaccaccatgtgctatgggaagtgtgcacgatgcatcggacattctctggtggggctcgccctcctgtgcatcgcggctaatattttgctttactttcccaatggggaaacaaagtatgcctccgaaaaccacctcagccgcttcgtgtggttcttttctggcatcgtaggaggtggcctgctgatgctcctgccagcatttgtcttcattgggctggaacaggatgactgctgtggctgctgtggccatgaaaactgtggcaaacgatgtgcgatgctttcttctgtattggctgctctcattggaattgcaggatctggctactgtgtcattgtggcagcccttggcttagcagaaggaccactatgtcttgattccctcggccagtggaactacacctttgccagcactgagggccagtaccttctggatacctccacatggtccgagtgcactgaacccaagcacattgtggaatggaatgtatctctgttttctatcctcttggctcttggtggaattgaattcatcttgtgtcttattcaagtaataaatggagtgcttggaggcatatgtggcttttgctgctctcaccaacagcaatatgactgctaaaagaaccaacccaggacagagccacaatcttcctctatttcattgtaatttatatatttcacttgtattcatttgtaaaactttgtattagtgtaacatactccccacagtctacttttacaaacgcctgtaaagactggcatcttcacaggatgtcagtgtttaaatttagtaaacttcttttttgtttgtttatttgtttttgtttttttttaaggaatgaggaaacaaaccaccctctgggggtaatttacagactgagtgacagtactcagtatatctgagataaactctataatgttttggataaaaataacattccaatcactattgtatatatgtgcatgtattttttaaattaaagatgtctagttgctttttataagaccaagaaggagaaaatccgacaacctggaaagatttttgttttcactgcttgtatgatgtttcccattcatacacctataaatctctaacaagaggccctttgaactgccttgtgttctgtgagaaacaaatatttacttagagtggaaggactgattgagaatgttccaatccaaatgaatgcatcacaacttacaatgctgctcattgttgtgagtactatgagattcaaatttttctaacatatggaaagccttttgtcctccaaagatgagtactagggatcatgtgtttaaaaaaagaaaggctacgatgactgggcaagaagaaagatgggaaactgaataaagcagttgatcagcatcattggaacatggggacgagtgacggcaggaggaccacgaggaaataccctcaaaactaacttgtttacaacaaaataaagtattcactacca

SEQ ID NO: 1970 - protein, 202 aa, Homo sapiens
MCYGKCARCIGHSLVGLALLCIAANILLYFPNGETKYASENHLSRFVWFFSGIVGGGLLMLLPAFVFIGLEQDDCCGCCGHENCGKRCAMLSSVLAALIGIAGSGYCVIVAALGLAEGPLCLDSLGQWNYTFASTEGQYLLDTSTWSECTEPKHIVEWNVSLFSILLALGGIEFILCLIQVINGVLGGICGFCCSHQQQYDC

SEQ ID NO: 1971 - DNA, 2440 bp, Homo sapiens
ctctttccctccctcctctcctctccctctcctctcctgctatagagggctccgacagcagttcccagccagcgtgttcagcctgcctgcctgcctgcctctgtgtgtgtgtgagcgtgtgtgcgtgcgtctactttgtactgggaagaacacagcccatgtgctctgcatggacgttactgatactctgtttagcttgattttcgaaaagcaggcaagatgtccagcacaccacatgaccccttctattcttctcctttcggcccattttataggaggcatacaccatacatggtacagccagagtaccgaatctatgagatgaacaagagactgcagtctcgcacagaggatagtgacaacctctggtgggacgcctttgccactgaattttttgaagatgacgccacattaaccctttcattttgtttggaagatggaccaaagcgatacactatcggcaggaccctcatcccccgttactttagcactgtgtttgaaggaggggtgaccgacctgtattacattctcaaacactcgaaagagtcataccacaactcatccatcacggtggactgcgaccagtgtaccatggtcacccagcacgggaagcccatgtttaccaaggtatgtacagaaggcagactgatcttggagttcacctttgatgatctcatgagaatcaaaacatggcactttaccattagacaataccgagagttagtcccgagaagcatcctagccatgcatgcacaagatcctcaggtcctggatcagctgtccaaaaacatcaccaggatggggctaacaaacttcaccctcaactacctcaggttgtgtgtaatattggagccaatgcaggaactgatgtcgagacataaaacttacaacctcagtccccgagactgcctgaagacctgcttgtttcagaagtggcagaggatggtggctccgccagcagaacccacaaggcaaccaacaaccaaacggagaaaaaggaaaaattccaccagcagcacttccaacagcagcgctgggaacaatgcaaacagcactggcagcaagaagaagaccacagctgcaaacctgagtctgtccagtcaggtacctgatgtgatggtggtaggagagccaactctgatgggaggtgagtttggggacgaggacgaaaggctaatcactagattagaaaacacgcaatatgatgcggccaacggcatggacgacgaggaggacttcaacaattcacccgcgctggggaacaacagcccgtggaacagtaaacctcccgccactcaagagaccaaatcagaaaaccccccaccccaggcttcccaataagatgatcggcaccagaatccactgtcaataggcccgtgggtgatcattacaattgcaaatctttacttacaggagaggaaacagaagagataaaaacttttccatgcaaatatctatttctaaaccacaatgatctgattttctttcttctttctttttttctaattgagaggattattcccagtaagcttccatgaccctttcttggaggccttcacaggtaatacagatactggcactgattgtaattaaaatgagagaaaactctagcgcatcttctggcacggttttaacaacgtgtttgtgttgaatttcctttttatgcatcaaacgaaggccatattgtccataaatgctcagtgctcaggatctcattaatatgccgaacctaactacagatgactttttaatattgtaaaatattttctgctttttgacttgcatctgagagtttcttgtttcagtaaaaaaagaaaagacaaaaaaatcagctttggaaagtaatttaaatgtaccttattttttttttctttatgttttctttcattgggcaacagctaagagggcccagcaaggtaatttatggttgagctgatgtcaattggttcttgtcttgagtcgactcaatttagcccaagtgctgaaacaagaaatgtcatttttttcatcaaagacaccagggcagatttttaagtaaagaaagacaattggacccttaagaatttatgcatttgtaaagttgctgttgatccaaatattttcaagccatgtaatccattggttttgtgggcagtttaataaacctgaacctttgtgtgttttctaattgtacctgagttgaccatcctttctttttatagtatatttcttgtatgatattttgtaaagctctcacctggttcttttatggggacttttcgtttttgggcaactccagtgtatttatgtgaaactttataagagaattaatttttccatttgcatattaatatgttcctccacacatgtaaaggcacagtggctccgtgtgttaaaaaacagctgtattttatgtatgctttactgataagtgtgccaataataaactgtgttaatgacc

SEQ ID NO: 1972 - protein, 373 aa, Homo sapiens
MSSTPHDPFYSSPFGPFYRRHTPYMVQPEYRIYEMNKRLQSRTEDSDNLWWDAFATEFFEDDATLTLSFCLEDGPKRYTIGRTLIPRYFSTVFEGGVTDLYYILKHSKESYHNSSITVDCDQCTMVTQHGKPMFTKVCTEGRLILEFTFDDLMRIKTWHFTIRQYRELVPRSILAMHAQDPQVLDQLSKNITRMGLTNFTLNYLRLCVILEPMQELMSRHKTYNLSPRDCLKTCLFQKWQRMVAPPAEPTRQPTTKRRKRKNSTSSTSNSSAGNNANSTGSKKKTTAANLSLSSQVPDVMVVGEPTLMGGEFGDEDERLITRLENTQYDAANGMDDEEDFNNSPALGNNSPWNSKPPATQETKSENPPPQASQ

SEQ ID NO: 1973 - DNA, 2472 bp, Homo sapiens
gtgagcgtgtgtgcgtgcgtctactttgtactgggaagaacacagcccatgtgctctgcatggacgttactgatactctgtttagcttgattttcgaaaagcaggcaagatgtccagcacaccacatgaccccttctattcttctcctttcggcccattttataggaggcatacaccatacatggtacagccagagtaccgaatctatgagatgaacaagagactgcagtctcgcacagaggatagtgacaacctctggtgggacgcctttgccactgaattttttgaagatgacgccacattaaccctttcattttgtttggaagatggaccaaagcgatacactatcggcaggaccctcatcccccgttactttagcactgtgtttgaaggaggggtgaccgacctgtattacattctcaaacactcgaaagagtcataccacaactcatccatcacggtggactgcgaccagtgtaccatggtcacccagcacgggaagcccatgtttaccaaggtatgtacagaaggcagactgatcttggagttcacctttgatgatctcatgagaatcaaaacatggcactttaccattagacaataccgagagttagtcccgagaagcatcctagccatgcatgcacaagatcctcaggtcctggatcagctgtccaaaaacatcaccaggatggggctaacaaacttcaccctcaactacctcaggttgtgtgtaatattggagccaatgcaggaactgatgtcgagacataaaacttacaacctcagtccccgagactgcctgaagacctgcttgtttcagaagtggcagaggatggtggctccgccagcagaacccacaaggcaaccaacaaccaaacggagaaaaaggaaaaattccaccagcagcacttccaacagcagcgctgggaacaatgcaaacagcactggcagcaagaagaagaccacagctgcaaacctgagtctgtccagtcaggtacctgggctaggagcgatcccgaactgcagcctcaaccctgggagggatggagacctgtgtcattcaacagcagtgaccccttctggccaatttaaggagaagcattgaggggccctgaaaggagtcacttccagtcctcctcagagatgtgatggtggtaggagagccaactctgatgggaggtgagtttggggacgaggacgaaaggctaatcactagattagaaaacacgcaatatgatgcggccaacggcatggacgacgaggaggacttcaacaattcacccgcgctggggaacaacagcccgtggaacagtaaacctcccgccactcaagagaccaaatcagaaaaccccccaccccaggcttcccaataagatgatcggcaccagaatccactgtcaataggcccgtgggtgatcattacaattgcaaatctttacttacaggagaggaaacagaagagataaaaacttttccatgcaaatatctatttctaaaccacaatgatctgattttctttcttctttctttttttctaattgagaggattattcccagtaagcttccatgaccctttcttggaggccttcacaggtaatacagatactggcactgattgtaattaaaatgagagaaaactctagcgcatcttctggcacggttttaacaacgtgtttgtgttgaatttcctttttatgcatcaaacgaaggccatattgtccataaatgctcagtgctcaggatctcattaatatgccgaacctaactacagatgactttttaatattgtaaaatattttctgctttttgacttgcatctgagagtttcttgtttcagtaaaaaaagaaaagacaaaaaaatcagctttggaaagtaatttaaatgtaccttattttttttttctttatgttttctttcattgggcaacagctaagagggcccagcaaggtaatttatggttgagctgatgtcaattggttcttgtcttgagtcgactcaatttagcccaagtgctgaaacaagaaatgtcatttttttcatcaaagacaccagggcagatttttaagtaaagaaagacaattggacccttaagaatttatgcatttgtaaagttgctgttgatccaaatattttcaagccatgtaatccattggttttgtgggcagtttaataaacctgaacctttgtgtgttttctaattgtacctgagttgaccatcctttctttttatagtatatttcttgtatgatattttgtaaagctctcacctggttcttttatggggacttttcgtttttgggcaactccagtgtatttatgtgaaactttataagagaattaatttttccatttgcatattaatatgttcctccacacatgtaaaggcacagtggctccgtgtgttaaaaaacagctgtattttatgtatgctttactgataagtgtgccaataataaactgtgttaatgacc

SEQ ID NO: 1974 - protein, 331 aa, Homo sapiens
MSSTPHDPFYSSPFGPFYRRHTPYMVQPEYRIYEMNKRLQSRTEDSDNLWWDAFATEFFEDDATLTLSFCLEDGPKRYTIGRTLIPRYFSTVFEGGVTDLYYILKHSKESYHNSSITVDCDQCTMVTQHGKPMFTKVCTEGRLILEFTFDDLMRIKTWHFTIRQYRELVPRSILAMHAQDPQVLDQLSKNITRMGLTNFTLNYLRLCVILEPMQELMSRHKTYNLSPRDCLKTCLFQKWQRMVAPPAEPTRQPTTKRRKRKNSTSSTSNSSAGNNANSTGSKKKTTAANLSLSSQVPGLGAIPNCSLNPGRDGDLCHSTAVTPSGQFKEKH

SEQ ID NO: 1975 - DNA, 537 bp, Homo sapiens
atggaactgcttcaagtgaccattctttttcttctgcccagtatttgcagcagtaacagcacaggtgttttagaggcagctaataattcacttgttgttactacaacaaaaccatctataacaacaccaaacacagaatcattacagaaaaatgttgtcacaccaacaactggaacaactcctaaaggaacaatcaccaatgaattacttaaaatgtctctgatgtcaacagctacttttttaacaagtaaagatgaaggattgaaagccacaaccactgatgtcaggaagaatgactccatcatttcaaacgtaacagtaacaagtgttacacttccaaatgctgtttcaacattacaaagttccaaacccaagactgaaactcagagttcaattaaaacaacagaaataccaggcacaccagaaaatggaaatgatcaacctcagtctgataaagagagcgtgaagcttcttaccgttaagacaatttctcatgagtctggtgagcactctgcacaaggaaaaaccaagaactga

SEQ ID NO: 1976 - protein, 178 aa, Homo sapiens
MELLQVTILFLLPSICSSNSTGVLEAANNSLVVTTTKPSITTPNTESLQKNVVTPTTGTTPKGTITNELLKMSLMSTATFLTSKDEGLKATTTDVRKNDSIISNVTVTSVTLPNAVSTLQSSKPKTETQSSIKTTEIPGTPENGNDQPQSDKESVKLLTVKTISHESGEHSAQGKTKN

SEQ ID NO: 1977 - DNA, 786 bp, Homo sapiens
atggaactgcttcaagtgaccattctttttcttctgcccagtatttgcagcagtaacagcacaggtgttttagaggcagctaataattcacttgttgttactacaacaaaaccatctataacaacaccaaacacagaatcattacagaaaaatgttgtcacaccaacaactggaacaactcctaaaggaacaatcaccaatgaattacttaaaatgtctctgatgtcaacagctacttttttaacaagtaaagatgaaggattgaaagccacaaccactgatgtcaggaagaatgactccatcatttcaaacgtaacagtaacaagtgttacacttccaaatgctgtttcaacattacaaagttccaaacccaagactgaaactcagagttcaattaaaacaacagaaataccaggtagtgttctacaaccagatgcatcaccttctaaaactggtacattaacctcaataccagttacaattccagaaaacacctcacagtctcaagtaataggcactgagggtggaaaaaatgcaagcacttcagcaaccagccggtcttattccagtattattttgccggtggttattgctttgattgtaataacactttcagtatttgttctggtgggtttgtaccgaatgtgctggaaggcagatccgggcacaccagaaaatggaaatgatcaacctcagtctgataaagagagcgtgaagcttcttaccgttaagacaatttctcatgagtctggtgagcactctgcacaaggaaaaaccaagaactga

SEQ ID NO: 1978 - protein, 261 aa, Homo sapiens
MELLQVTILFLLPSICSSNSTGVLEAANNSLVVTTTKPSITTPNTESLQKNVVTPTTGTTPKGTITNELLKMSLMSTATFLTSKDEGLKATTTDVRKNDSIISNVTVTSVTLPNAVSTLQSSKPKTETQSSIKTTEIPGSVLQPDASPSKTGTLTSIPVTIPENTSQSQVIGTEGGKNASTSATSRSYSSIILPVVIALIVITLSVFVLVGLYRMCWKADPGTPENGNDQPQSDKESVKLLTVKTISHESGEHSAQGKTKN

SEQ ID NO: 1979 - DNA, 1747 bp, Homo sapiens
atgctgcagggccctggctcgctgctgctgctcttcctcgcctcgcactgctgcctgggctcggcgcgcgggctcttcctctttggccagcccgacttctcctacaagcgcagcaattgcaagcccatccctgccaacctgcagctgtgccacggcatcgaataccagaacatgcggctgcccaacctgctgggccacgagaccatgaaggaggtgctggagcaggccggcgcttggatcccgctggtcatgaagcagtgccacccggacaccaagaagttcctgtgctcgctcttcgcccccgtctgcctcgatgacctagacgagaccatccagccatgccactcgctctgcgtgcaggtgaaggaccgctgcgccccggtcatgtccgccttcggcttcccctggcccgacatgcttgagtgcgaccgtttcccccaggacaacgacctttgcatccccctcgctagcagcgaccacctcctgccagccaccgaggaagctccaaaggtatgtgaagcctgcaaaaataaaaatgatgatgacaacgacataatggaaacgctttgtaaaaatgattttgcactgaaaataaaagtgaaggagataacctacatcaaccgagataccaaaatcatcctggagaccaagagcaagaccatttacaagctgaacggtgtgtccgaaagggacctgaagaaatcggtgctgtggctcaaagacagcttgcagtgcacctgtgaggagatgaacgacatcaacgcgccctatctggtcatgggacagaaacagggtggggagctggtgatcacctcggtgaagcggtggcagaaggggcagagagagttcaagcgcatctcccgcagcatccgcaagctgcagtgctagtcccggcatcctgatggctccgacaggcctgctccagagcacggctgaccatttctgctccgggatctcagctcccgttccccaagcacactcctagctgctccagtctcagcctgggcagcttccccctgccttttgcacgtttgcatccccagcatttcctgagttataaggccacaggagtggatagctgttttcacctaaaggaaaagcccacccgaatcttgtagaaatattcaaactaataaaatcatgaatatttttatgaagtttaaaaatagctcactttaaagctagttttgaataggtgcaactgtgacttgggtctggttggttgttgtttgttgttttgagtcagctgattttcacttcccactgaggttgtcataacatgcaaattgcttcaattttctctgtggcccaaacttgtgggtcacaaaccctgttgagataaagctggctgttatctcaacatcttcatcagctccagactgagactcagtgtctaagtcttacaacaattcatcattttataccttcaatgggaacttaaactgttacatgtatcacattccagctacaatacttccatttattagaagcacattaaccatttctatagcatgatttcttcaagtaaaaggcaaaagatataaattttataattgacttgagtactttaagccttgtttaaaacatttcttacttaacttttgcaaattaaacccattgtagcttacctgtaatatacatagtagtttacctttaaaagttgtaaaaatattgctttaaccaacactgtaaatatttcagataaacattatattcttgtatataaactttacatcctgttttacct

SEQ ID NO: 1980 - protein, 295 aa, Homo sapiens
MLQGPGSLLLLFLASHCCLGSARGLFLFGQPDFSYKRSNCKPIPANLQLCHGIEYQNMRLPNLLGHETMKEVLEQAGAWIPLVMKQCHPDTKKFLCSLFAPVCLDDLDETIQPCHSLCVQVKDRCAPVMSAFGFPWPDMLECDRFPQDNDLCIPLASSDHLLPATEEAPKVCEACKNKNDDDNDIMETLCKNDFALKIKVKEITYINRDTKIILETKSKTIYKLNGVSERDLKKSVLWLKDSLQCTCEEMNDINAPYLVMGQKQGGELVITSVKRWQKGQREFKRISRSIRKLQC

SEQ ID NO: 1981 - DNA, 1744 bp, Homo sapiens
aaggggaaggggaagggctcaaagggagagagcgccgggatccggacggggagcaaccggggcaggccgtgccggctgaggaggtcctgaggctacagagctgccgcggctggcacacgagcgcctcggcactaaccgagtgttcgcgggggctgtgaggggagggccccgggcgccattgctggcggtgggagcgccgcccggtctcagcccgccctcggctgctctcctcctccggctgggaggggccgtagctcggggccgtcgccagccccggcccgggctcgagaatcaagggcctcggccgccgtcccgcagctcagtccatcgcccttgccgggcagcccgggcagagaccatgtttgacaagacgcggctgccgtacgtggccctcgatgtgctctgcgtgttgctggctggattgccttttgcaattcttacttcaaggcatacccccttccaacgaggagtattctgtaatgatgagtccatcaagtacccttacaaagaagacaccataccttatgcgttattaggtggaataatcattccattcagtattatcgttattattcttggagaaaccctgtctgtttactgtaaccttttgcactcaaattcctttatcaggaataactacatagccactatttacaaagccattggaacctttttatttggtgcagctgctagtcagtccctgactgacattgccaagtattcaataggcagactgcggcctcacttcttggatgtttgtgatccagattggtcaaaaatcaactgcagcgatggttacattgaatactacatatgtcgagggaatgcagaaagagttaaggaaggcaggttgtccttctattcaggccactcttcgttttccatgtactgcatgctgtttgtggcactttatcttcaagccaggatgaagggagactgggcaagactcttacgccccacactgcaatttggtcttgttgccgtatccatttatgtgggcctttctcgagtttctgattataaacaccactggagcgatgtgttgactggactcattcagggagctctggttgcaatattagttgctgtatatgtatcggatttcttcaaagaaagaacttcttttaaagaaagaaaagaggaggactctcatacaactctgcatgaaacaccaacaactgggaatcactatccgagcaatcaccagccttgaaaggcagcagggtgcccaggtgaagctggcctgttttctaaaggaaaatgattgccacaaggcaagaggatgcatctttcttcctggtgtacaagcctttaaagacttctgctgctgctatgcctcttggatgcacactttgtgtgtacatagttacctttaactcagtggttatctaatagctctaaactcattaaaaaaactccaagccttccaccaaaacagtgccccacctgtatacatttttattaaaaaaatgtaatgcttatgtataaacatgtatgtaatatgctttctatgaatgatgtttgatttaaatataatacatattaaaatgtatgggagaaccaaatccacacttgcaggcatttgtagtcaactgtaatcaaacaggtggtcaataatttaaaatctcacattcctttagctgactctacaagtagaggctggcagcaaacacaatatctctcttgattttggtgattcctaagagaaaagaaagtaaggtttaaactttcaagaccacaaaac

SEQ ID NO: 1982 - protein, 284 aa, Homo sapiens
MFDKTRLPYVALDVLCVLLAGLPFAILTSRHTPFQRGVFCNDESIKYPYKEDTIPYALLGGIIIPFSIIVIILGETLSVYCNLLHSNSFIRNNYIATIYKAIGTFLFGAAASQSLTDIAKYSIGRLRPHFLDVCDPDWSKINCSDGYIEYYICRGNAERVKEGRLSFYSGHSSFSMYCMLFVALYLQARMKGDWARLLRPTLQFGLVAVSIYVGLSRVSDYKHHWSDVLTGLIQGALVAILVAVYVSDFFKERTSFKERKEEDSHTTLHETPTTGNHYPSNHQP

SEQ ID NO: 1983 - DNA, 1623 bp, Homo sapiens
tcagcgggaggggctggaccccgcgttcctcctccctgccggtccccatccttaaagcgagagtctggacgccccgcctgtgggagagagcgccgggatccggacggggagcaaccggggcaggccgtgccggctgaggaggtcctgaggctacagagctgccgcggctggcacacgagcgcctcggcactaaccgagtgttcgcgggggctgtgaggggagggccccgggcgccattgctggcggtgggagcgccgcccggtctcagcccgccctcggctgctctcctcctccggctgggaggggccgtagctcggggccgtcgccagccccggcccgggctcgagaatcaagggcctcggccgccgtcccgcagctcagtccatcgcccttgccgggcagcccgggcagagaccatgtttgacaagacgcggctgccgtacgtggccctcgatgtgctctgcgtgttgctggcttccatgcctatggctgttctaaaattgggccaaatatatccatttcagagaggctttttctgtaaagacaacagcatcaactatccgtaccatgacagtaccgtcacatccactgtcctcatcctagtgggggttggcttgcccatttcctctattattcttggagaaaccctgtctgtttactgtaaccttttgcactcaaattcctttatcaggaataactacatagccactatttacaaagccattggaacctttttatttggtgcagctgctagtcagtccctgactgacattgccaagtattcaataggcagactgcggcctcacttcttggatgtttgtgatccagattggtcaaaaatcaactgcagcgatggttacattgaatactacatatgtcgagggaatgcagaaagagttaaggaaggcaggttgtccttctattcaggccactcttcgttttccatgtactgcatgctgtttgtggcactttatcttcaagccaggatgaagggagactgggcaagactcttacgccccacactgcaatttggtcttgttgccgtatccatttatgtgggcctttctcgagtttctgattataaacaccactggagcgatgtgttgactggactcattcagggagctctggttgcaatattagttgctgtatatgtatcggatttcttcaaagaaagaacttcttttaaagaaagaaaagaggaggactctcatacaactctgcatgaaacaccaacaactgggaatcactatccgagcaatcaccagccttgaaaggcagcagggtgcccaggtgaagctggcctgttttctaaaggaaaatgattgccacaaggcaagaggatgcatctttcttcctggtgtacaagcctttaaagacttctgctgctgctatgcctcttggatgcacactttgtgtgtacatagttacctttaactcagtggttatctaatagctctaaactcattaaaaaaactccaagccttccaccaaaacagtgccccacctgtatacatttttattaaaaaaatgtaatgcttatgtataaacatgtatgtaatatgctttctatgaatgatgtttgatttaaatataatacatattaaaatgtatgggagaacc

SEQ ID NO: 1984 - protein, 285 aa, Homo sapiens
MFDKTRLPYVALDVLCVLLASMPMAVLKLGQIYPFQRGFFCKDNSINYPYHDSTVTSTVLILVGVGLPISSIILGETLSVYCNLLHSNSFIRNNYIATIYKAIGTFLFGAAASQSLTDIAKYSIGRLRPHFLDVCDPDWSKINCSDGYIEYYICRGNAERVKEGRLSFYSGHSSFSMYCMLFVALYLQARMKGDWARLLRPTLQFGLVAVSIYVGLSRVSDYKHHWSDVLTGLIQGALVAILVAVYVSDFFKERTSFKERKEEDSHTTLHETPTTGNHYPSNHQP

SEQ ID NO: 1985 - DNA, 5165 bp, Homo sapiens
agagcgcgagtgaggagcaggcgggcaggcggcgggcagccgggcagccgtggacagaggcccgggcacagccagttgctgtgccagagggtgtggtgtccggctacagattgccccaaagcggcctcacaccagagacgggttaagaagagggattggaggtccaccactccactagcccaggaaggacttatctttcgtctcagccagacctcaccccaattctgtgaatcagcggaggaaggcaaaagtgcagagagtcagaggaggctgtgtaaggagcagagaccagggctcacacagctggccccagcccaggccctggcccaggcccaggagcctgcttccctgcatcgctgaggaagaacagcaccatgctgggtcctcacctcccacctccgccccttgcacccagcgaagggaggcctaccccctgcgccttccagatccctgatggaagctacaggtgtctggctctggaagccgaggagagcagcggtgaggagggcctgcagggagaggtggggcctaccgacctggaagaggatgagggggtcagcaggagtggggacgactctgcctgcagagtcacccaggggacaccgcagctgcccaaagccctgggcatccaaccacccagctgctccagagaggaacaaggggcgtcccagcacgacgacagggccagccaggactgggatgtagtgaaggccgggcagatgatgacagccagccccagccctggccctgggcccagagtggcccagaaaccagcgttgggccggagcactagcctcacggagaaggatctgaaagaagccaaggcgcggagccagcagattgcagcccagctgaccacccctcccagctccaattcccgtggcgtccagctcttcaacaggcgccggcagagggtgaacgagttcaccttggagagccacggccagaggggacagaagcccagccaggagtccctcagagtgctcccttcaagcctcccaggccatgcaccggggctcagcctgagttccacctcgctgccggagccaggccctccacggcaccccagtccccagagccccgacagaggggtccctggccacagcatggaggggtactcagaggaggctagcttgctgcggcacctggagaaggtggccagtgaggaggaagaggtaccactggtggtttatctaaaggagaatgcagcactgctgacagccaatgggctgcacctgtcccaaaaccgagaggcccagcagtcctcaccggccccacctccagctgaggtccacagcccagctgcagatgtcaaccaaaaccttgcctcgcccagtgccacgctcaccacaccaacttctaacagcagccacaatccgccagccaccgatgtcaatcagaacccaccggcaactgttgtcccacagagcctgccactttctagcatccaacagaattcctcagaggcccaactcccatctaatggcacagggcctgcttccaaacccagcaccctgtgtgctgatgggcaaccccaggcaccggctgaggaggtgagatgcagcacactcctaattgacaaggtatcaactccagctaccaccaccagcaccttctccagagaagctacgctcatccccagctccaggcccccagcctcagatttcatgtccagctccctgctcattgacatccagcccaacaccctagtggtgtcagcagatcaagagatgtctgggcgagcagctgccaccacgcccaccaaggtctacagtgaggtccacttcacactggccaagcccccatcagtggtcaacaggacggccaggccttttgggatccaggcgccagggggcaccagccagatggagaggagccccatgctagagagacgacattttggggagaaggccccggctccccagccccccagtttgccagacaggagcccccggccacagagacacataatgtcccgcagccccatggtggaaaggaggatgatggggcagcgaagcccggcctcagagagacgccccttggggaacttcactgcaccccccacctacactgagaccttgtccacagcccctctggcttcctgggtgaggtctcctccctcatattctgtcctgtatcccagctccgaccccaagtcttctcatctgaagggccaggcggttcctgccagcaagacgggcattctggaggagtcgatggcccgccggggcagccgcaaatccatgtttactttcgtggagaagcccaaggtgaccccgaatccagacttgctggatctggtacagacagcggatgagaagcggcggcagagggaccagggggaggtaggcgtggaggaggagcccttcgcactgggggccgaggcctccaacttccagcaggagccagcacctcgtgacagggccagccccgcggcggcggaggaggtggtaccagagtgggcctcctgcctcaagtcaccccgcatccaggccaagccgaagcccaaacccaaccagaacctctccgaggcctctgggaagggagctgagctctacgcccgccgccagtcacggatggagaaatatgtcatcgagtcttcaagccacacgccagagctggcccgctgcccatcacctaccatgtccctgccttcctcctggaaataccccactaacgcccccggggccttccgagtggcatcccgaagcccagcccggaccccgcctgcctccctctaccatggctacctgcctgagaacggggtcctgcgcccagagcccaccaagcagccgccataccagctgcgcccctcgctctttgtcctctcacctatcaaggagcctgccaaggtctcaccaagagctgcctcgcccgccaagcccagctccttggacctggtgcccaacctgcccaagggggctctccctccatctcctgccctgcctcggccctcgcgctcctcaccgggcctctacacctcccccggccaggacagcctgcagcccactgccgtgagccctccttacggcggtgacatctcccccgtgtctccctccagggcgtggtctccccgagccaagcaggcccccaggccctccttctctacccggaacgccgggatcgaggctcaggtgtggaagccttccttctgcttcaagtaacgaaccccacgggggtcccactgccggtcaagttcccctccttgagggccagatggagagcagatgtggcaggaaatggcacagagctgagtgaggagaatggggagtccatggttcaaggtcagatgcggccaccagctggctttgtgaccttgggcgagtcgcctcccctctctgagctgaagccgcccctcccctactacaacaggggtcggactccatgtctgagcggggaggagggtcatggagagagaactgtctggcagccctgatgcggtagaggggcatcctctggcctttgtgagctgtagggatgcagagtctgatgccagcgtcttgctgggggagtggcctagaaggggatcctaacagggacttctggagcagacagagcctgccagtgcctgtggagtcagccagccgagggtctgcctcctcagctgccccaggggggcctccctcctgaggctcaagctcctggcgtctttcttcctgttgctggattctcacctccatgggcctgtctcttctgcctctgccttctggacaccgtttcctctccgctgcttcagagagctttgcctcgcctccgcctgcgctcccctccagggtccttctgctggctgcggactcggcccaccactgctgtctgacgcttttcttcctgccccctctgaggcctggctctgttttagggagatcactgggcccaggcctcagccccagttctacctggcttgctgtcaccgctctaggggtgggggacgtcccaggggatccccaggagaaggagagccctgtagggggctgtgcagatgtgggtgtgccacagggagggtggcccctagccatgtatccattggctgttttggcttcagattcaaccaagatctgcctgactaaaagaagccacctcagcgcagtggaacggggcccagggggaggcaggagaggagggttccggtcccatgtcaccttctcatttgctgtgtgactttggcccactcacattctctttgggcctcagttttatcatttatacaaggagggcttttctagctgtaacaatctgtgaggattgagaggataggctggtgctttgaagaaaggccttgtaagtgacaagacagtcccctgggaagaaagagaaaggaaatgggctattgccaaaggacaggtggcgttagatggctgtgagggtgacctggtgagggaagggttggaatgagctgctgcaggaggccaagggatgcctgggctgggctgggctgggctggcttaggctcaggattgcctggggacagtaggagcatggcaggagctggggcaggtgcatagcagtgcagtgggaagggacagaggagatcttagaattttgaggaaaatctgggacttgagacctggattctaacagaccaactgcatgtgtgtctgtaggtctcagtttccacattcatacagtgagggtgttaagtcaggtagctggagacttcccatcgcctctgacacttttggaggtgatatgatacagcccccgaccaaaccaggctttgtggggggtgagagaatacagacacaagtggcaggattcagatggaagcttcgcaaggctgggggccgaggaccacccacttctctttcccagccctagttctgggttccccagtggggcaaggggtggtggaggcagtgcccatgctgggctgagcctgcagtttttgtgagctctgggcttgtctccatgggaacaggggtgccttcttagtgagctcatttcacacagatcgagggggtatgcgtgggggagttgtgagtgagctcagctccttcaggcctggcctctcccagaacagagtgaagcccctgccctggacccctgctcccttctacccttgagggccaccaatggaagagcccgcccttcattctgcagctcctgcggccaggctgagctctgcccccaactttgttttctctcatgttctcaatacactctgcctc

SEQ ID NO: 1986 - protein, 929 aa, Homo sapiens
MLGPHLPPPPLAPSEGRPTPCAFQIPDGSYRCLALEAEESSGEEGLQGEVGPTDLEEDEGVSRSGDDSACRVTQGTPQLPKALGIQPPSCSREEQGASQHDDRASQDWDVVKAGQMMTASPSPGPGPRVAQKPALGRSTSLTEKDLKEAKARSQQIAAQLTTPPSSNSRGVQLFNRRRQRVNEFTLESHGQRGQKPSQESLRVLPSSLPGHAPGLSLSSTSLPEPGPPRHPSPQSPDRGVPGHSMEGYSEEASLLRHLEKVASEEEEVPLVVYLKENAALLTANGLHLSQNREAQQSSPAPPPAEVHSPAADVNQNLASPSATLTTPTSNSSHNPPATDVNQNPPATVVPQSLPLSSIQQNSSEAQLPSNGTGPASKPSTLCADGQPQAPAEEVRCSTLLIDKVSTPATTTSTFSREATLIPSSRPPASDFMSSSLLIDIQPNTLVVSADQEMSGRAAATTPTKVYSEVHFTLAKPPSVVNRTARPFGIQAPGGTSQMERSPMLERRHFGEKAPAPQPPSLPDRSPRPQRHIMSRSPMVERRMMGQRSPASERRPLGNFTAPPTYTETLSTAPLASWVRSPPSYSVLYPSSDPKSSHLKGQAVPASKTGILEESMARRGSRKSMFTFVEKPKVTPNPDLLDLVQTADEKRRQRDQGEVGVEEEPFALGAEASNFQQEPAPRDRASPAAAEEVVPEWASCLKSPRIQAKPKPKPNQNLSEASGKGAELYARRQSRMEKYVIESSSHTPELARCPSPTMSLPSSWKYPTNAPGAFRVASRSPARTPPASLYHGYLPENGVLRPEPTKQPPYQLRPSLFVLSPIKEPAKVSPRAASPAKPSSLDLVPNLPKGALPPSPALPRPSRSSPGLYTSPGQDSLQPTAVSPPYGGDISPVSPSRAWSPRAKQAPRPSFSTRNAGIEAQVWKPSFCFK

SEQ ID NO: 1987 - DNA, 5098 bp, Homo sapiens
agtttgcatcttaggtcacaccactcctgtgattcctgtggtattgccccaaagcggcctcacaccagagacgggttaagaagagggattggaggtccaccactccactagcccaggaaggacttatctttcgtctcagccagacctcaccccaattctgtgaatcagcggaggaaggcaaaagtgcagagagtcagaggaggctgtgtaaggagcagagaccagggctcacacagctggccccagcccaggccctggcccaggcccaggagcctgcttccctgcatcgctgaggaagaacagcaccatgctgggtcctcacctcccacctccgccccttgcacccagcgaagggaggcctaccccctgcgccttccagatccctgatggaagctacaggtgtctggctctggaagccgaggagagcagcggtgaggagggcctgcagggagaggtggggcctaccgacctggaagaggatgagggggtcagcaggagtggggacgactctgcctgcagagtcacccaggggacaccgcagctgcccaaagccctgggcatccaaccacccagctgctccagagaggaacaaggggcgtcccagcacgacgacagggccagccaggactgggatgtagtgaaggccgggcagatgatgacagccagccccagccctggccctgggcccagagtggcccagaaaccagcgttgggccggagcactagcctcacggagaaggatctgaaagaagccaaggcgcggagccagcagattgcagcccagctgaccacccctcccagctccaattcccgtggcgtccagctcttcaacaggcgccggcagagggtgaacgagttcaccttggagagccacggccagaggggacagaagcccagccaggagtccctcagagtgctcccttcaagcctcccaggccatgcaccggggctcagcctgagttccacctcgctgccggagccaggccctccacggcaccccagtccccagagccccgacagaggggtccctggccacagcatggaggggtactcagaggaggctagcttgctgcggcacctggagaaggtggccagtgaggaggaagaggtaccactggtggtttatctaaaggagaatgcagcactgctgacagccaatgggctgcacctgtcccaaaaccgagaggcccagcagtcctcaccggccccacctccagctgaggtccacagcccagctgcagatgtcaaccaaaaccttgcctcgcccagtgccacgctcaccacaccaacttctaacagcagccacaatccgccagccaccgatgtcaatcagaacccaccggcaactgttgtcccacagagcctgccactttctagcatccaacagaattcctcagaggcccaactcccatctaatggcacagggcctgcttccaaacccagcaccctgtgtgctgatgggcaaccccaggcaccggctgaggaggtgagatgcagcacactcctaattgacaaggtatcaactccagctaccaccaccagcaccttctccagagaagctacgctcatccccagctccaggcccccagcctcagatttcatgtccagctccctgctcattgacatccagcccaacaccctagtggtgtcagcagatcaagagatgtctgggcgagcagctgccaccacgcccaccaaggtctacagtgaggtccacttcacactggccaagcccccatcagtggtcaacaggacggccaggccttttgggatccaggcgccagggggcaccagccagatggagaggagccccatgctagagagacgacattttggggagaaggccccggctccccagccccccagtttgccagacaggagcccccggccacagagacacataatgtcccgcagccccatggtggaaaggaggatgatggggcagcgaagcccggcctcagagagacgccccttggggaacttcactgcaccccccacctacactgagaccttgtccacagcccctctggcttcctgggtgaggtctcctccctcatattctgtcctgtatcccagctccgaccccaagtcttctcatctgaagggccaggcggttcctgccagcaagacgggcattctggaggagtcgatggcccgccggggcagccgcaaatccatgtttactttcgtggagaagcccaaggtgaccccgaatccagacttgctggatctggtacagacagcggatgagaagcggcggcagagggaccagggggaggtaggcgtggaggaggagcccttcgcactgggggccgaggcctccaacttccagcaggagccagcacctcgtgacagggccagccccgcggcggcggaggaggtggtaccagagtgggcctcctgcctcaagtcaccccgcatccaggccaagccgaagcccaaacccaaccagaacctctccgaggcctctgggaagggagctgagctctacgcccgccgccagtcacggatggagaaatatgtcatcgagtcttcaagccacacgccagagctggcccgctgcccatcacctaccatgtccctgccttcctcctggaaataccccactaacgcccccggggccttccgagtggcatcccgaagcccagcccggaccccgcctgcctccctctaccatggctacctgcctgagaacggggtcctgcgcccagagcccaccaagcagccgccataccagctgcgcccctcgctctttgtcctctcacctatcaaggagcctgccaaggtctcaccaagagctgcctcgcccgccaagcccagctccttggacctggtgcccaacctgcccaagggggctctccctccatctcctgccctgcctcggccctcgcgctcctcaccgggcctctacacctcccccggccaggacagcctgcagcccactgccgtgagccctccttacggcggtgacatctcccccgtgtctccctccagggcgtggtctccccgagccaagcaggcccccaggccctccttctctacccggaacgccgggatcgaggctcaggtgtggaagccttccttctgcttcaagtaacgaaccccacgggggtcccactgccggtcaagttcccctccttgagggccagatggagagcagatgtggcaggaaatggcacagagctgagtgaggagaatggggagtccatggttcaaggtcagatgcggccaccagctggctttgtgaccttgggcgagtcgcctcccctctctgagctgaagccgcccctcccctactacaacaggggtcggactccatgtctgagcggggaggagggtcatggagagagaactgtctggcagccctgatgcggtagaggggcatcctctggcctttgtgagctgtagggatgcagagtctgatgccagcgtcttgctgggggagtggcctagaaggggatcctaacagggacttctggagcagacagagcctgccagtgcctgtggagtcagccagccgagggtctgcctcctcagctgccccaggggggcctccctcctgaggctcaagctcctggcgtctttcttcctgttgctggattctcacctccatgggcctgtctcttctgcctctgccttctggacaccgtttcctctccgctgcttcagagagctttgcctcgcctccgcctgcgctcccctccagggtccttctgctggctgcggactcggcccaccactgctgtctgacgcttttcttcctgccccctctgaggcctggctctgttttagggagatcactgggcccaggcctcagccccagttctacctggcttgctgtcaccgctctaggggtgggggacgtcccaggggatccccaggagaaggagagccctgtagggggctgtgcagatgtgggtgtgccacagggagggtggcccctagccatgtatccattggctgttttggcttcagattcaaccaagatctgcctgactaaaagaagccacctcagcgcagtggaacggggcccagggggaggcaggagaggagggttccggtcccatgtcaccttctcatttgctgtgtgactttggcccactcacattctctttgggcctcagttttatcatttatacaaggagggcttttctagctgtaacaatctgtgaggattgagaggataggctggtgctttgaagaaaggccttgtaagtgacaagacagtcccctgggaagaaagagaaaggaaatgggctattgccaaaggacaggtggcgttagatggctgtgagggtgacctggtgagggaagggttggaatgagctgctgcaggaggccaagggatgcctgggctgggctgggctgggctggcttaggctcaggattgcctggggacagtaggagcatggcaggagctggggcaggtgcatagcagtgcagtgggaagggacagaggagatcttagaattttgaggaaaatctgggacttgagacctggattctaacagaccaactgcatgtgtgtctgtaggtctcagtttccacattcatacagtgagggtgttaagtcaggtagctggagacttcccatcgcctctgacacttttggaggtgatatgatacagcccccgaccaaaccaggctttgtggggggtgagagaatacagacacaagtggcaggattcagatggaagcttcgcaaggctgggggccgaggaccacccacttctctttcccagccctagttctgggttccccagtggggcaaggggtggtggaggcagtgcccatgctgggctgagcctgcagtttttgtgagctctgggcttgtctccatgggaacaggggtgccttcttagtgagctcatttcacacagatcgagggggtatgcgtgggggagttgtgagtgagctcagctccttcaggcctggcctctcccagaacagagtgaagcccctgccctggacccctgctcccttctacccttgagggccaccaatggaagagcccgcccttcattctgcagctcctgcggccaggctgagctctgcccccaactttgttttctctcatgttctcaatacactctgcctc

SEQ ID NO: 1988 - protein, 685 aa, Homo sapiens
MEGYSEEASLLRHLEKVASEEEEVPLVVYLKENAALLTANGLHLSQNREAQQSSPAPPPAEVHSPAADVNQNLASPSATLTTPTSNSSHNPPATDVNQNPPATVVPQSLPLSSIQQNSSEAQLPSNGTGPASKPSTLCADGQPQAPAEEVRCSTLLIDKVSTPATTTSTFSREATLIPSSRPPASDFMSSSLLIDIQPNTLVVSADQEMSGRAAATTPTKVYSEVHFTLAKPPSVVNRTARPFGIQAPGGTSQMERSPMLERRHFGEKAPAPQPPSLPDRSPRPQRHIMSRSPMVERRMMGQRSPASERRPLGNFTAPPTYTETLSTAPLASWVRSPPSYSVLYPSSDPKSSHLKGQAVPASKTGILEESMARRGSRKSMFTFVEKPKVTPNPDLLDLVQTADEKRRQRDQGEVGVEEEPFALGAEASNFQQEPAPRDRASPAAAEEVVPEWASCLKSPRIQAKPKPKPNQNLSEASGKGAELYARRQSRMEKYVIESSSHTPELARCPSPTMSLPSSWKYPTNAPGAFRVASRSPARTPPASLYHGYLPENGVLRPEPTKQPPYQLRPSLFVLSPIKEPAKVSPRAASPAKPSSLDLVPNLPKGALPPSPALPRPSRSSPGLYTSPGQDSLQPTAVSPPYGGDISPVSPSRAWSPRAKQAPRPSFSTRNAGIEAQVWKPSFCFK

SEQ ID NO: 1989 - DNA, 5328 bp, Homo sapiens
gagaaaagtcacatccagctccttcatgttgctgccgatgtgggattttcctggcttcgtcagccaagcaattggctgcctttgccggaggctttgagaaccaaggcttgaaggccggcaggagcatccagggggaagcttggcttcagggaggacctagcagacgttgggccggagcactagcctcacggagaaggatctgaaagaagccaaggcgcggagccagcagattgcagcccagctgaccacccctcccagctccaattcccgtggcgtccagctcttcaacaggcgccggcagagggtgaacgagttcaccttggagagccacggccagaggggacagaagcccagccaggagtccctcagagtgctcccttcaagcctcccaggccatgcaccggggctcagcctgagttccacctcgctgccggagccaggccctccacggcaccccagtccccagagccccgacagaggggtccctggccacagcatggaggggtactcagaggaggctagcttgctgcggcacctggagaaggtggccagtgaggaggaagaggtaccactggtggtttatctaaaggagaatgcagcactgctgacagccaatgggctgcacctgtcccaaaaccgagaggcccagcagtcctcaccggccccacctccagctgaggtccacagcccagctgcagatgtcaaccaaaaccttgcctcgcccagtgccacgctcaccacaccaacttctaacagcagccacaatccgccagccaccgatgtcaatcagaacccaccggcaactgttgtcccacagagcctgccactttctagcatccaacagaattcctcagaggcccaactcccatctaatggcacagggcctgcttccaaacccagcaccctgtgtgctgatgggcaaccccaggcaccggctgaggaggtgagatgcagcacactcctaattgacaaggtatcaactccagctaccaccaccagcaccttctccagagaagctacgctcatccccagctccaggcccccagcctcagatttcatgtccagctccctgctcattgacatccagcccaacaccctagtggtgtcagcagatcaagagatgtctgggcgagcagctgccaccacgcccaccaaggtctacagtgaggtccacttcacactggccaagcccccatcagtggtcaacaggacggccaggccttttgggatccaggcgccagggggcaccagccagatggagaggagccccatgctagagagacgacattttggggagaaggccccggctccccagccccccagtttgccagacaggagcccccggccacagagacacataatgtcccgcagccccatggtggaaaggaggatgatggggcagcgaagcccggcctcagagagacgccccttggggaacttcactgcaccccccacctacactgagaccttgtccacagcccctctggcttcctgggtgaggtctcctccctcatattctgtcctgtatcccagctccgaccccaagtcttctcatctgaagggccaggcggttcctgccagcaagacgggcattctggaggagtcgatggcccgccggggcagccgcaaatccatgtttactttcgtggagaagcccaaggtgaccccgaatccagacttgctggatctggtacagacagcggatgagaagcggcggcagagggaccagggggaggtaggcgtggaggaggagcccttcgcactgggggccgaggcctccaacttccagcaggagccagcacctcgtgacagggccagccccgcggcggcggaggaggtggtaccagagtgggcctcctgcctcaagtcaccccgcatccaggccaagccgaagcccaaacccaaccagaacctctccgaggcctctgggaagggagctgagctctacgcccgccgccagtcacggatggagaaatatgtcatcgagtcttcaagccacacgccagagctggcccgctgcccatcacctaccatgtccctgccttcctcctggaaataccccactaacgcccccggggccttccgagtggcatcccgaagcccagcccggaccccgcctgcctccctctaccatggctacctgcctgagaacggggtcctgcgcccagagcccaccaagcagccgccataccagctgcgcccctcgctctttgtcctctcacctatcaaggagcctgccaaggtctcaccaagagctgcctcgcccgccaagcccagctccttggacctggtgcccaacctgcccaagggggctctccctccatctcctgccctgcctcggccctcgcgctcctcaccgggcctctacacctcccccggccaggacagcctgcagcccactgccgtgagccctccttacggcggtgacatctcccccgtgtctccctccagggcgtggtctccccgagccaagcaggcccccaggccctccttctctacccggaacgccgggatcgaggctcaggaccgccgggagagcctgcccacctccccaccctggacgccgggcgcgtcccggccccccagcagcctagacggctgggtgagcccgggcccgtgggagccaggtcgcgggagcagcatgagcagccccccgccgctgccgccgccaccgcccatgtctccctcgtggagcgagcgctcggtgtccccgctgcgacctgagaccgaggcgcggccccccagccgccagctgcaggcgcttctggcgcgaaacatcatcaatgcggcccggcgcaagagcgcctccccgcggtcggcgggcgccgagaacccgcggcccttctccccgccgagggcgccaccgcccccgcccccgcccccgcccccgcccccgcgcatgcgctcgccacagcccgcccgccccggctcggctgctgtgccgggggcagccttcgcgcccatcccgcggagcccgttgcccgccggtccttcgtcctgcaccagtccccggagcccgctgcccgcgcctcccaggcccttcctctaccgccgctcgcccacggactccgacgtgtccctcgactccgaggactccggggctaagtctccaggcatcctgggctacaatatctgtccccgcgggtggaatggcagccttcggctcaagcgtggcagcctccccgccgaggcctcctgcaccacctagagccccacccccgaccccaccccgggagggcagagccagaagaaggctcattagacctgggggacccaaagggtctggcctctttgggcagccccagagatgaggggtcagcagaggagagctctggggttggggatgggttagggacgcaagcttgagttctagcccttgctctcattcagctgttgtgtgaccctgggtaagacccttccttgtttgaccctcagctttcccatctgtttaatggtggctttggccaaggcaatccacaaacgtcaaaattccccttcccatcagtacacacaccgatgcacacacactctctctttctctctctctctctctcacacacacacacacacacacacacacacacacacacacacacactagttagtgccttggatgaggcggggcagtgtgtatatggacccctggacttgctaccttcagggttccatactcgtccctcccctcctggctctgctgtctggagtctggcaagcggggtgtgttcagaaggtcctaggcctgtgtcgcatgtccaggcactggcctgaccatccggctccctggcaccaagtcccaggcaggagcagctgttttccatcccttcccagacaagctctatttttatcacaatgacctttagagaggtctcccaggccagctcaaggtgtcccactatcccctctggagggaagaggcaggaaaattctccccgggtccctgtcatgctactttctccatcccagttcagactgtccaggacatcttatctgcagccataagagaattataaggcagtgatttcccttaggcccaggacttgggcctccagctcatctgttccttctgggcccattcatggcaggttctgggctcaaagctgaactggggagagaagagatacagagctaccatgtgactttacctgattgccctcagtttggggttgcttattgggaaagagagagacaaagagttacttgttacgggaaatatgaaaagcatggccaggatgcatagaggagattctagcaggggacaggattggctcagatgacccctgagggctcttccagtcttgaaatgcattccatgatattaggaagtcgggggtgggtggtggtggtgggctagttgggcttgaatttaggggccgatgagcttgggtacgtgagcagggtgttaagttagggtctgcctgtatttctggtccccttggaaatgtccccttcttcagtgtcagacctcagtcccagtgtccatatcgtgcccagaaaagtagacattatcctgccccatcccttccccagtgcactctgacctagctagtgcctggtgcccagtgacctgggggagcctggctgcaggccctcactggttccctaaaccttggtggctgtgattcaggtccccaggggggactcagggaggaatatggctgagttctgtagtttccagagttggctggtagagccttctagaggttcagaatattagcttcaggatcagctgggggtatggaattggctgaggatcaaacgtatgtaggtgaaaggataccaggatgttgctaaaggtgagggacagtttgggtttgggacttaccggggtgatgttagatctggaacccccaagtgaggctggagggagttaaggtcagtatggaagatagggttgggacagggtgctttggaatgaaagagtgaccttagagggctccttgggcctcaggaatgctcctgctgctgtgaagatgagaaggtgctcttactcagttaatgatgagtgactatatttaccaaagcccctacctgctgctgggtcccttgtagcacaggagactggggctaagggcccctcccagggaagggacaccatcaggcctctggctgaggcagtagcatagaggatccatttctacctgcatttcccagaggactagcaggaggcagccttgagaaaccggcagttcccaagccagcgcctggctgttctctcattgtcactgccctctccccaacctctcctctaacccactagagattgcctgtgtcctgcctcttgcctcttgtagaatgcagctctggccctcaataaatgcttcctgcatt

SEQ ID NO: 1990 - protein, 903 aa, Homo sapiens
MEGYSEEASLLRHLEKVASEEEEVPLVVYLKENAALLTANGLHLSQNREAQQSSPAPPPAEVHSPAADVNQNLASPSATLTTPTSNSSHNPPATDVNQNPPATVVPQSLPLSSIQQNSSEAQLPSNGTGPASKPSTLCADGQPQAPAEEVRCSTLLIDKVSTPATTTSTFSREATLIPSSRPPASDFMSSSLLIDIQPNTLVVSADQEMSGRAAATTPTKVYSEVHFTLAKPPSVVNRTARPFGIQAPGGTSQMERSPMLERRHFGEKAPAPQPPSLPDRSPRPQRHIMSRSPMVERRMMGQRSPASERRPLGNFTAPPTYTETLSTAPLASWVRSPPSYSVLYPSSDPKSSHLKGQAVPASKTGILEESMARRGSRKSMFTFVEKPKVTPNPDLLDLVQTADEKRRQRDQGEVGVEEEPFALGAEASNFQQEPAPRDRASPAAAEEVVPEWASCLKSPRIQAKPKPKPNQNLSEASGKGAELYARRQSRMEKYVIESSSHTPELARCPSPTMSLPSSWKYPTNAPGAFRVASRSPARTPPASLYHGYLPENGVLRPEPTKQPPYQLRPSLFVLSPIKEPAKVSPRAASPAKPSSLDLVPNLPKGALPPSPALPRPSRSSPGLYTSPGQDSLQPTAVSPPYGGDISPVSPSRAWSPRAKQAPRPSFSTRNAGIEAQDRRESLPTSPPWTPGASRPPSSLDGWVSPGPWEPGRGSSMSSPPPLPPPPPMSPSWSERSVSPLRPETEARPPSRQLQALLARNIINAARRKSASPRSAGAENPRPFSPPRAPPPPPPPPPPPPRMRSPQPARPGSAAVPGAAFAPIPRSPLPAGPSSCTSPRSPLPAPPRPFLYRRSPTDSDVSLDSEDSGAKSPGILGYNICPRGWNGSLRLKRGSLPAEASCTT

SEQ ID NO: 1991 - DNA, 3138 bp, Homo sapiens
gttgcctgtctctaaacccctccacattcccgcggtccttcagactgcccggagagcgcgctctgcctgccgcctgcctgcctgccactgagggttcccagcaccatgagggcctggatcttctttctcctttgcctggccgggagggccttggcagcccctcagcaagaagccctgcctgatgagacagaggtggtggaagaaactgtggcagaggtgactgaggtatctgtgggagctaatcctgtccaggtggaagtaggagaatttgatgatggtgcagaggaaaccgaagaggaggtggtggcggaaaatccctgccagaaccaccactgcaaacacggcaaggtgtgcgagctggatgagaacaacacccccatgtgcgtgtgccaggaccccaccagctgcccagcccccattggcgagtttgagaaggtgtgcagcaatgacaacaagaccttcgactcttcctgccacttctttgccacaaagtgcaccctggagggcaccaagaagggccacaagctccacctggactacatcgggccttgcaaatacatccccccttgcctggactctgagctgaccgaattccccctgcgcatgcgggactggctcaagaacgtcctggtcaccctgtatgagagggatgaggacaacaaccttctgactgagaagcagaagctgcgggtgaagaagatccatgagaatgagaagcgcctggaggcaggagaccaccccgtggagctgctggcccgggacttcgagaagaactataacatgtacatcttccctgtacactggcagttcggccagctggaccagcaccccattgacgggtacctctcccacaccgagctggctccactgcgtgctcccctcatccccatggagcattgcaccacccgctttttcgagacctgtgacctggacaatgacaagtacatcgccctggatgagtgggccggctgcttcggcatcaagcagaaggatatcgacaaggatcttgtgatctaaatccactccttccacagtaccggattctctctttaaccctccccttcgtgtttcccccaatgtttaaaatgtttggatggtttgttgttctgcctggagacaaggtgctaacatagatttaagtgaatacattaacggtgctaaaaatgaaaattctaacccaagacatgacattcttagctgtaacttaactattaaggccttttccacacgcattaatagtcccatttttctcttgccatttgtagctttgcccattgtcttattggcacatgggtggacacggatctgctgggctctgccttaaacacacattgcagcttcaacttttctctttagtgttctgtttgaaactaatacttaccgagtcagactttgtgttcatttcatttcagggtcttggctgcctgtgggcttccccaggtggcctggaggtgggcaaagggaagtaacagacacacgatgttgtcaaggatggttttgggactagaggctcagtggtgggagagatccctgcagaacccaccaaccagaacgtggtttgcctgaggctgtaactgagagaaagattctggggctgtgttatgaaaatatagacattctcacataagcccagttcatcaccatttcctcctttacctttcagtgcagtttcttttcacattaggctgttggttcaaacttttgggagcacggactgtcagttctctgggaagtggtcagcgcatcctgcagggcttctcctcctctgtcttttggagaaccagggctcttctcaggggctctagggactgccaggctgtttcagccaggaaggccaaaatcaagagtgagatgtagaaagttgtaaaatagaaaaagtggagttggtgaatcggttgttctttcctcacatttggatgattgtcataaggtttttagcatgttcctccttttcttcaccctccccttttttcttctattaatcaagagaaacttcaaagttaatgggatggtcggatctcacaggctgagaactcgttcacctccaagcatttcatgaaaaagctgcttcttattaatcatacaaactctcaccatgatgtgaagagtttcacaaatccttcaaaataaaaagtaatgacttagaaactgccttcctgggtgatttgcatgtgtcttagtcttagtcaccttattatcctgacacaaaaacacatgagcatacatgtctacacatgactacacaaatgcaaacctttgcaaacacattatgcttttgcacacacacacctgtacacacacaccggcatgtttatacacagggagtgtatggttcctgtaagcactaagttagctgttttcatttaatgacctgtggtttaacccttttgatcactaccaccattatcagcaccagactgagcagctatatccttttattaatcatggtcattcattcattcattcattcacaaaatatttatgatgtatttactctgcaccaggtcccatgccaagcactggggacacagttatggcaaagtagacaaagcatttgttcatttggagcttagagtccaggaggaatacattagataatgacacaatcaaatataaattgcaagatgtcacaggtgtgatgaagggagagtaggagagaccatgagtatgtgtaacaggaggacacagcattattctagtgctgtactgttccgtacggcagccactacccacatgtaactttttaagatttaaatttaaattagttaacattcaaaacgcagctccccaatcacactagcaacatttcaagtgcttgagagccatgcatgattagtggttaccctattgaataggtcagaagtagaatcttttcatcatcacagaaagttctattggacagtgctcttctagatcatcataagactacagagcacttttcaaagctcatgcatgttcatcatgttagtgtcgtattttgagctggggttttgagactccccttagagatagagaaacagacccaagaaatgtgctcaattgcaatgggccacatacctagatctccagatgtcatttcccctctcttattttaagttatgttaagattactaaaacaataaaagctcctaaaaaatc

SEQ ID NO: 1992 - protein, 303 aa, Homo sapiens
MRAWIFFLLCLAGRALAAPQQEALPDETEVVEETVAEVTEVSVGANPVQVEVGEFDDGAEETEEEVVAENPCQNHHCKHGKVCELDENNTPMCVCQDPTSCPAPIGEFEKVCSNDNKTFDSSCHFFATKCTLEGTKKGHKLHLDYIGPCKYIPPCLDSELTEFPLRMRDWLKNVLVTLYERDEDNNLLTEKQKLRVKKIHENEKRLEAGDHPVELLARDFEKNYNMYIFPVHWQFGQLDQHPIDGYLSHTELAPLRAPLIPMEHCTTRFFETCDLDNDKYIALDEWAGCFGIKQKDIDKDLVI

SEQ ID NO: 1993 - DNA, 1283 bp, Homo sapiens
gaaacattgagacagagcgcttggcacagaagtagcggggtcagggcgaagtcccagggcctcaggcgtggctctcaggatctcaggccccaaaggcggtgtatggattggggaggcccagcgctgggcattccccatctttgcagggtttctcttctccctctcccaacctgtgtcgggtccttcttcctgggtactcaccgggctgccccagttctcactcccattgagtgtcgggtttctagagaagccaatcaatgtagccgcggtcccggttctaaagttcccacgcacccaccgggactccgattcttcccagtcgccgaggatggtgtcatggcgccccgaaccctgcttctgctgctctcgggggccctggtcctgacccagacctgggcaggcttccactccttgaggtatttccacaccaccatgtcccggcccggccgcgcggatccccgcttcctctccgtgggcgacgtggacgacacgcagtgcgtgcggctcgacagcgacgccacgagtcccaggatggagccgcgggcgccgtggatggagcaggaggggccggaatattgggaagaggagacagggaccgccaaggccaaagcacagttttaccgagtgaacctgcggaccctgagcggctactacaaccagagtgaggcctaagtgcagcttcattccctccctgttcgtgtggcctggacttaatgactcacttctaactgatagagtaatgctgacataatagtttgtgattctgggtgtagaacataagactcactgaagtttctactttggttctttctttctctggaatcatgagccctgggggaagctggctgttgtgtcataaggaggcctgtggtccatgtgactaggaagtgagtcctcctgggaccagacaataagaagctaaagcctcttccaaaagccatgtgagagattcttgtgtcttgtgaatccccggccccatttgagccctcagatgattcagccctggaagacaactagactgcaacgttgtgagaggccctgagccagaagcattcagagaaacttctcctggattcctgaccatggataactgtgggagatgataaatatttgttgatttgagctgctaagttgtaggtgacttgttatgcagcagtagataactaatacagcttcacaagagaggatgaatcactgaactttttcatttgctctaaattcattataagatattaaacatgtcatttgcttttaatatttaataaaaatttccatggctatat

SEQ ID NO: 1994 - protein, 189 aa, Homo sapiens
MDWGGPALGIPHLCRVSLLPLPTCVGSFFLGTHRAAPVLTPIECRVSREANQCSRGPGSKVPTHPPGLRFFPVAEDGVMAPRTLLLLLSGALVLTQTWAGFHSLRYFHTTMSRPGRADPRFLSVGDVDDTQCVRLDSDATSPRMEPRAPWMEQEGPEYWEEETGTAKAKAQFYRVNLRTLSGYYNQSEA

SEQ ID NO: 1995 - DNA, 1671 bp, Homo sapiens
actttgtcttgaggagatgtcctggactcacacggaaacttagggctacggaatgaagacgccaaggatggtggtcatggcgccccgaaccctcttcctgctgctctcgggggccctgaccctgaccgagacctgggcgggctcccactccatgaggtatttcagcgccgccgtgtcccggcccggccgcggggagccccgcttcatcgccatgggctacgtggacgacacgcagttcgtgcggttcgacagcgactcggcgtgtccgaggatggagccgcgggcgccgtgggtggagcaggaggggccggagtattgggaagaggagacacggaacaccaaggcccacgcacagactgacagaatgaacctgcagaccctgcgcggctactacaaccagagcgaggccagttctcacaccctccagtggatgattggctgcgacctggggtccgacggacgcctcctccgcgggtatgaacagtatgcctacgatggcaaggattacctcgccctgaacgaggacctgcgctcctggaccgcagcggacactgcggctcagatctccaagcgcaagtgtgaggcggccaatgtggctgaacaaaggagagcctacctggagggcacgtgcgtggagtggctccacagatacctggagaacgggaaggagatgctgcagcgcgcggacccccccaagacacacgtgacccaccaccctgtctttgactatgaggccaccctgaggtgctgggccctgggcttctaccctgcggagatcatactgacctggcagcgggatggggaggaccagacccaggacgtggagctcgtggagaccaggcctgcaggggatggaaccttccagaagtgggcagctgtggtggtgccttctggagaggagcagagatacacgtgccatgtgcagcatgaggggctgccggagcccctcatgctgagatggaagcagtcttccctgcccaccatccccatcatgggtatcgttgctggcctggttgtccttgcagctgtagtcactggagctgcggtcgctgctgtgctgtggagaaagaagagctcagattgaaaaggagggagctactctcaggctgcaagtaagtatgaaggaggctgatccctgagatccttgggatcttgtgtttgggagcccatgggggagctcacccaccccacaattcctcctctggccacatctcctgtggtctctgaccaggtgctgtttttgttctactctaggcagtgacagtgcccagggctctaatgtgtctctcacggcttgtaaatgtgacaccccggggggcctgatgtgtgtgggttgttgaggggaacaggggacatagctgtgctatgaggtttctttgacttcaatgtattgagcatgtgatgggctgtttaaagtgtcacccctcactgtgactgatatgaatttgttcatgaattccctttgtgacttcaagaaccctgactcctctttgtgcagagaccagcccacccctgtgcccaccatgaccctcttcctcatgctgaactgcattccttccccaatcacctttcctgttccagaaaaggggctgggatgtctccgtctctgtctcaaatttgtggtccactgagctataacttacttctgtattaaaattagaatctgagtat

SEQ ID NO: 1996 - protein, 343 aa, Homo sapiens
MKTPRMVVMAPRTLFLLLSGALTLTETWAGSHSMRYFSAAVSRPGRGEPRFIAMGYVDDTQFVRFDSDSACPRMEPRAPWVEQEGPEYWEEETRNTKAHAQTDRMNLQTLRGYYNQSEASSHTLQWMIGCDLGSDGRLLRGYEQYAYDGKDYLALNEDLRSWTAADTAAQISKRKCEAANVAEQRRAYLEGTCVEWLHRYLENGKEMLQRADPPKTHVTHHPVFDYEATLRCWALGFYPAEIILTWQRDGEDQTQDVELVETRPAGDGTFQKWAAVVVPSGEEQRYTCHVQHEGLPEPLMLRWKQSSLPTIPIMGIVAGLVVLAAVVTGAAVAAVLWRKKSSD

SEQ ID NO: 1997 - DNA, 1826 bp, Homo sapiens
cccattaggtgacaggtttttagagaagccaatcagcgtcgccgcggtcctggttctaaagtcctcgctcacccacccggactcattctccccagacgccaaggatggtggtcatggcgccccgaaccctcttcctgctgctctcgggggccctgaccctgaccgagacctgggcgggctcccactccatgaggtatttcagcgccgccgtgtcccggcccggccgcggggagccccgcttcatcgccatgggctacgtggacgacacgcagttcgtgcggttcgacagcgactcggcgtgtccgaggatggagccgcgggcgccgtgggtggagcaggaggggccggagtattgggaagaggagacacggaacaccaaggcccacgcacagactgacagaatgaacctgcagaccctgcgcggctactacaaccagagcgaggccagttctcacaccctccagtggatgattggctgcgacctggggtccgacggacgcctcctccgcgggtatgaacagtatgcctacgatggcaaggattacctcgccctgaacgagtgcgctcctggaccgcagcggacactgcggctcagatctccaagcgcaagtgtgaggcggccaatgtggctgaacaaaggagagcctacctggagggcacgtgcgtggagtggctccacagatacctggagaacgggaaggagatgctgcagcgcgcggacccccccaagacacacgtgacccaccaccctgtctttgactatgaggccaccctgaggtgctgggccctgggcttctaccctgcggagatcatactgacctggcagcgggatggggaggaccagacccaggacgtggagctcgtggagaccaggcctgcaggggatggaaccttccagaagtgggcagctgtggtggtgccttctggagaggagcagagatacacgtgccatgtgcagcatgaggggctgccggagcccctcatgctgagatggaagcagtcttccctgcccaccatccccatcatgggtatcgttgctggcctggttgtccttgcagctgtagtcactggagctgcggtcgctgctgtgctgtggagaaagaagagctcagattgaaaaggagggagctactctcaggctgcaagtaagtatgaaggaggctgatccctgagatccttgggatcttgtgtttgggagcccatgggggagctcacccaccccacaattcctcctctggccacatctcctgtggtctctgaccaggtgctgtttttgttctactctaggcagtgacagtgcccagggctctaatgtgtctctcacggcttgtaaatgtgacaccccggggggcctgatgtgtgtgggttgttgaggggaacaggggacatagctgtgctatgaggtttctttgacttcaatgtattgagcatgtgatgggctgtttaaagtgtcacccctcactgtgactgatatgaatttgttcatgaatatttttctgtagtgtgaaacagctgccctgtgtgggactgagtggcaagtccctttgtgacttcaagaaccctgactcctctttgtgcagagaccagcccacccctgtgcccaccatgaccctcttcctcatgctgaactgcattccttccccaatcacctttcctgttccagaaaaggggctgggatgtctccgtctctgtctcaaatttgtggtccactgagctataacttacttctgtattaaaattagaatctgagtataaatttactttttcaaattatttccaagagagattgatgggttaattaaaggagaagattcctgaaatttgag

SEQ ID NO: 1998 - protein, 183 aa, Homo sapiens
MRYFSAAVSRPGRGEPRFIAMGYVDDTQFVRFDSDSACPRMEPRAPWVEQEGPEYWEEETRNTKAHAQTDRMNLQTLRGYYNQSEASSHTLQWMIGCDLGSDGRLLRGYEQYAYDGKDYLALNECAPGPQRTLRLRSPSASVRRPMWLNKGEPTWRARAWSGSTDTWRTGRRCCSARTPPRHT

SEQ ID NO: 1999 - DNA, 1257 bp, Homo sapiens
ggatggtggtcatggcgccccgaaccctcttcctgctgctctcgggggccctgaccctgaccgagacctgggcgggctcccactccatgaggtatttcagcgccgccgtgtcccggcccggccgcggggagccccgcttcatcgccatgggctacgtggacgacacgcagttcgtgcggttcgacagcgactcggcgtgtccgaggatggagccgcgggcgccgtgggtggagcaggaggggccggagtattgggaagaggagacacggaacaccaaggcccacgcacagactgacagaatgaacctgcagaccctgcgcggctactacaaccagagcgaggccagttctcacaccctccagtggatgattggctgcgacctggggtccgacggacgcctcctccgcgggtatgaacagtatgcctacgatggcaaggattacctcgccctgaacgaggacctgcgctcctggaccgcagcggacactgcggctcagatctccaagcgcaagtgtgaggcggccaatgtggctgaacaaaggagagcctacctggagggcacgtgcgtggagtggctccacagatacctggagaacgggaaggagatgctgcagcgcgcggacccccccaagacacacgtgacccaccaccctgtctttgactatgaggccaccctgaggtgctgggccctgggcttctaccctgcggagatcatactgacctggcagcgggatggggaggaccagacccaggacgtggagctcgtggagaccaggcctgcaggggatggaaccttccagaagtgggcagctgtggtggtgccttctggagaggagcagagatacacgtgccatgtgcagcatgaggggctgccggagcccctcatgctgagatggaagcagtcttccctgcccaccatccccatcatgggtatcgttgctggcctggttgtccttgcagctgtagtcactggagctgcggtcgctgctgtgctgtggagaaagaagagctcagattgaaaaggagggagctactctcaggctgcaatgtgagacagctgccttgtgtgggactgagaggcaagatttgttcatgccttccctttgtgacttcaagaaccctgacttctctttctgcaaagaccagcccacacccgtgtccaccatgaccctgttccccacactgacctacattccttccccgatcacctttcctgttccagagaagtggtgctgggatgtctccatctctgtctca

SEQ ID NO: 2000 - protein, 338 aa, Homo sapiens
MVVMAPRTLFLLLSGALTLTETWAGSHSMRYFSAAVSRPGRGEPRFIAMGYVDDTQFVRFDSDSACPRMEPRAPWVEQEGPEYWEEETRNTKAHAQTDRMNLQTLRGYYNQSEASSHTLQWMIGCDLGSDGRLLRGYEQYAYDGKDYLALNEDLRSWTAADTAAQISKRKCEAANVAEQRRAYLEGTCVEWLHRYLENGKEMLQRADPPKTHVTHHPVFDYEATLRCWALGFYPAEIILTWQRDGEDQTQDVELVETRPAGDGTFQKWAAVVVPSGEEQRYTCHVQHEGLPEPLMLRWKQSSLPTIPIMGIVAGLVVLAAVVTGAAVAAVLWRKKSSD

SEQ ID NO: 2001 - DNA, 1304 bp, Homo sapiens
agacgccgacgatggggtcatggcgccccgaaccctcctcctgctgctctcggggaccctggccctggccgagacctgggcgggctcccactccatgaggtatttcagcaccgccgtttcctggccgggccgcggggagcccagcttcattgccgtgggctacgtggacgacacgcagttcgtgcgggtcgacagtgacgccgtgagtctgaggatgaagacgcgggcgcggtgggtggagcaggaggggccggagtattgggacctacagacactgggcgccaaggcccaggcacagactgaccgagtgaacctgcggaccctgctccgctactacaaccagagcgaggcggaccccccccaagacacacgtgacccacccccctctctgaacatgaggcataacgaggtcctgggttctgggcttctaccctgcggagatcacattgacctggcagcgggatggggaggaccagacccaggacatggagctcgtggagaccaggcccacaggggatggaaccttccagaagtgggcggttgtggtagtgccttctggagaggaacagagatacacatgccatgtgcagcacaaggggctgcccaagcccctcatcctgagatgggagccctctccccagcccaccatccccattgtgggtatcattgctggcctggttctccttggagctgtggtcactggagctgtggtcactgctgtgatgtggaggaagaagagctcagtcacacatttctggaaacttctcaaggttccaagactaggaggttcctctaggacctcatggccctgctaccttcctggcctctcacaggacgttttcttcccgcagatagaaaaggagggagctactctcaggctgcaatgtgagacagctgccttgtgtgggactgagaggcaagatttgttcatgccttccctttgtgacttcaagaaccctgacttctctttctgcaaaggcatctgaatgtgtctgtgtccctataggcataatgtgaggtggtggggagaccagcccacacccgtgtccaccatgaccctgttccccacactgacctacattccttccccgatcacctttcctgttccagagaagtggtgctgggatgtctccatctctgtctcaacttcatggtgcactgagctgtaacttcttacttccctattaaaattagaatctgagtataaatttacttttttcaaattatttccatgacgggttgatgggttaattaaaggagaagattcctaaaatttgagagacaaaataaatggaagacatgag

SEQ ID NO: 2002 - protein, 264 aa, Homo sapiens
DADDGVMAPRTLLLLLSGTLALAETWAGSHSMRYFSTAVSWPGRGEPSFIAVGYVDDTQFVRVDSDAVSLRMKTRARWVEQEGPEYWDLQTLGAKAQAQTDRVNLRTLLRYYNQSEADPPQDTRDPPPSLNMRHNEVLGSGLLPCGDHIDLAAGWGGPDPGHGARGDQAHRGWNLPEVGGCGSAFWRGTEIHMPCAAQGAAQAPHPEMGALSPAHHPHCGYHCWPGSPWSCGHWSCGHCCDVEEEELSHTFLETSQGSKTRRFL

SEQ ID NO: 2003 - DNA, 1398 bp, Homo sapiens
cgatggggtcatggcgccccgaaccctcctcctgctgctctcggggacccctggccgagacctgggcgggctcccactccatgaggtatttcagcaccgccgtttcctggccgggccgcggggagcccagcttcattgccgtgggctacgtggacgacacgcagttcgtgcgggtcgacagtgacgccgtgagtctgaggatgaagacgcgggcgcggtgggtggagcaggaggggccggagtattgggacctacagacactgggcgccaaggcccaggcacagactgaccgagtgaacctgcggaccctgctccgctactacaaccagagcgaggcggggtatcacatcctccagggaatgtttggctgcgacctggggcccgacgggcgtctcctccgcgggtatgagcagtatgcctacgacggcaaggattacatcgccctgaacgaggacctgcgctcctggaccgccgcggataccgcggctcagattacccagcgcaagtatgaggcggccaatgtggctgagcaaaggagagcctacctggagggcacctgcatggagtggctccgcagacacctggagaacgggaaggagacgctgcagcgcgcggaccccccccaagacacacgtgacccacccccctctctgaacatgaggcataacgaggtcctgggttctgggcttctaccctgcggagatcacattgacctggcagcgggatggggaggaccagacccaggacatggagctcgtggagaccaggcccacaggggatggaaccttccagaagtgggcggttgtggtagtgccttctggagaggaacagagatacacatgccatgtgcagcacaaggggctgcccaagcccctcatcctgagatgggtcacacatttctggaaacttctcaaggttccaagactaggaggttcctctaggacctcatggccctgctaccttcctggcctctcacaggacgttttcttcccgcagatagaaaaggagggagctactctcaggctgcaagcagccaaagtgcccagggctctgatgtgtctctcacggcttgtaaagtgtgagacagctgccttgtgtgggactgagaggcaagatttgttcatgccttccctttgtgacttcaagaaccctgacttctctttctgcaaaggcatctgaatgtgtctgtgtccctataggcataatgtgaggtggtggggagaccagcccacacccgtgtccaccatgaccctgttccccacactgacctacattccttccccgatcacctttcctgttccagagaagtggtgctgggatgtctccatctctgtctcaacttcatggtgcactgagctgtaacttcttacttccctattaaaattagaatctgagtat

SEQ ID NO: 2004 - protein, 312 aa, Homo sapiens
MGSWRPEPSSCCSRGPLAETWAGSHSMRYFSTAVSWPGRGEPSFIAVGYVDDTQFVRVDSDAVSLRMKTRARWVEQEGPEYWDLQTLGAKAQAQTDRVNLRTLLRYYNQSEAGYHILQGMFGCDLGPDGRLLRGYEQYAYDGKDYIALNEDLRSWTAADTAAQITQRKYEAANVAEQRRAYLEGTCMEWLRRHLENGKETLQRADPPQDTRDPPPSLNMRHNEVLGSGLLPCGDHIDLAAGWGGPDPGHGARGDQAHRGWNLPEVGGCGSAFWRGTEIHMPCAAQGAAQAPHPEMGHTFLETSQGSKTRRFL

SEQ ID NO: 2005 - DNA, 1819 bp, Homo sapiens
ccttgatactcacgaagcggacacagttctcattcccactaggtgtcgggtttctagagaagccaatcggtgccgccgcggtcccggttctaaagtccccacgcacccaccgggactcagattctccccagacgccgaggatggtgctcatggcgccccgaaccctcctcctgctgctctcaggggccctggccctgaccctgacccagacctgggcgcgctcccactccatgaggtatttctacaccaccatgtcccggcccggccgcggggagccccgcttcatctccgtcggctacgtggacgatacgcagttcgtgcggttcgacagcgacgacgcgagtccgagagaggagccgcgggcgccgtggatggagcgggaggggccagagtattgggaccggaacacacagatctgcaaggcccaggcacagactgaacgagagaacctgcggatcgcgctccgctactacaaccagagcgagggcggttctcacaccatgcaggtgatgtatggctgcgacgtggggcccgacgggcgcttcctccgcgggtatgaacagcacgcctacgacggcaaggattacatcgccctgaacgaggacctgcgctcctggaccgcggcggacatggcagctcagatcaccaagcgcaagtgggaggcggcccgtcgggcggagcagctgagagcctacctggagggcgagttcgtggagtggctccgcagatacctggagaacgggaaggagacgctgcagcgcgcggacccccccacacatatgacccaccaccccatctctgaccatgaggccaccctgaggtgctgggccctgggcttctaccctgcggagatcacactgacctggcagcgggatggggaggaccagacccaggacacggagctcgtggagaccaggcctgcaggggatggaaccttccagaagtgggcggctgtggtggtgccttctggagaggagcagagatacacctgccatgtgcagcatgagggtctgcccgagcccctcaccctgagatgggagccatcttcccagcccaacgtccccatcgtgggcatcgttgctggcctggttctacttgtagctgtggtcactggagctgtggtcgctgctgtaatgtggaggaagaagagctcagatagaaaaggagggagctactctcaggctgcaagcagcaacagtgcccagggctctgatgtgtctctcacggcttgaaaggtgagaccttggggggcctgatgtgtgggggatgttgggggggaacagtggacacagctgtgctatggggttctttgaatttgatgttttgagcatgcgatgggctgccaaagtgtcatccattactgggacagatatgaatttgttcatgaatattttttctatagtgtgagacagctgccttgtgtgggactgagaggcaagagttgttcctgccttccctttgtgacttgaagaaccctgactttctttctacaaaggcacctgaatgtgtctgtgttcctgtaggcataatgtgtggaggaggggagaccaacccaccctcatgtccaccatgaccctcttccccacgctgatctgtgttccctccccaatcatctttcctgttccagagaggaggggctgagatgtctccatctttttctcaactttatgtgcactgagctgtaacttcttacttccctcttaaaattagaatctgagtaaacatttactttttcaaattcttgccatgagaggttgatgacttaattaaaggagaagattcctaaaatttgagagacaaaataaatggaacacatgag

SEQ ID NO: 2006 - protein, 363 aa, Homo sapiens
MVLMAPRTLLLLLSGALALTLTQTWARSHSMRYFYTTMSRPGRGEPRFISVGYVDDTQFVRFDSDDASPREEPRAPWMEREGPEYWDRNTQICKAQAQTERENLRIALRYYNQSEGGSHTMQVMYGCDVGPDGRFLRGYEQHAYDGKDYIALNEDLRSWTAADMAAQITKRKWEAARRAEQLRAYLEGEFVEWLRRYLENGKETLQRADPPTHMTHHPISDHEATLRCWALGFYPAEITLTWQRDGEDQTQDTELVETRPAGDGTFQKWAAVVVPSGEEQRYTCHVQHEGLPEPLTLRWEPSSQPNVPIVGIVAGLVLLVAVVTGAVVAAVMWRKKSSDRKGGSYSQAASSNSAQGSDVSLTA

SEQ ID NO: 2007 - DNA, 1097 bp, Homo sapiens
atggccgtcatggcgccccgaaccctcctcctgctactctcgggggccctggccctgacccagacctgggcgggctcccactccatgaggtatttcttcacatccgtgtcccggcccggccgcggggagccccgcttcatcgccgtgggctacgtggacgacacgcagttcgtgcggttcgacagcgacgccgcgagccagaggatggagccgcgggcgccgtggatagagcaggaggggccggagtattgggaccaggagacacggaatgtgaaggcccagtcacagactgaccgagtggacctggggaccctgcgcggctactacaaccagagcgaggccggttctcacaccatccagataatgtatggctgcgacgtggggtcggacgggcgcttcctccgcgggtaccggcaggacgcctacgacggcaaggattacatcgccctgaacgaggacctgcgctcttggaccgcggcggacatggcggctcagatcaccaagcgcaagtgggaggcggcccatgaggcggagcagttgagagcctacctggatggcacgtgcgtggagtggctccgcagatacctggagaacgggaaggagacgctgcagcgcacggacccccccaagacacatatgacccaccaccccatctctgaccatgaggccaccctgaggtgctgggccctgggcttctaccctgcggagatcacactgacctggcagcgggatggggaggaccagacccaggacacggagctcgtggagaccaggcctgcaggggatggaaccttccagaagtgggcggctgtggtggtgccttctggagaggagcagagatacacctgccatgtgcagcatgagggtctgcccaagcccctcaccctgagatgggagctgtcttcccagcccaccatccccatcgtgggcatcattgctggcctggttctccttggagctgtgatcactggagctgtggtcgctgccgtgatgtggaggaggaagagctcagatagaaaaggagggagttacactcaggctgcaagcagtgacagtgcccagggctctgatgtgtccctcacagcttgtaaaggtga

SEQ ID NO: 2008 - protein, 365 aa, Homo sapiens
MAVMAPRTLLLLLSGALALTQTWAGSHSMRYFFTSVSRPGRGEPRFIAVGYVDDTQFVRFDSDAASQRMEPRAPWIEQEGPEYWDQETRNVKAQSQTDRVDLGTLRGYYNQSEAGSHTIQIMYGCDVGSDGRFLRGYRQDAYDGKDYIALNEDLRSWTAADMAAQITKRKWEAAHEAEQLRAYLDGTCVEWLRRYLENGKETLQRTDPPKTHMTHHPISDHEATLRCWALGFYPAEITLTWQRDGEDQTQDTELVETRPAGDGTFQKWAAVVVPSGEEQRYTCHVQHEGLPKPLTLRWELSSQPTIPIVGIIAGLVLLGAVITGAVVAAVMWRRKSSDRKGGSYTQAASSDSAQGSDVSLTACKG

SEQ ID NO: 2009 - DNA, 1661 bp, Homo sapiens
ctcaggactcagaggctgggatcatggtagatggaaccctccttttactcctctcggaggccctggcccttacccagacctgggcgggctcccactccttgaagtatttccacacttccgtgtcccggcccggccgcggggagccccgcttcatctctgtgggctacgtggacgacacccagttcgtgcgcttcgacaacgacgccgcgagtccgaggatggtgccgcgggcgccgtggatggagcaggaggggtcagagtattgggaccgggagacacggagcgccagggacaccgcacagattttccgagtgaatctgcggacgctgcgcggctactacaatcagagcgaggccgggtctcacaccctgcagtggatgcatggctgcgagctggggcccgacgggcgcttcctccgcgggtatgaacagttcgcctacgacggcaaggattatctcaccctgaatgaggacctgcgctcctggaccgcggtggacacggcggctcagatctccgagcaaaagtcaaatgatgcctctgaggcggagcaccagagagcctacctggaagacacatgcgtggagtggctccacaaatacctggagaaggggaaggagacgctgcttcacctggagcccccaaagacacacgtgactcaccaccccatctctgaccatgaggccaccctgaggtgctgggccctgggcttctaccctgcggagatcacactgacctggcagcaggatggggagggccatacccaggacacggagctcgtggagaccaggcctgcaggggatggaaccttccagaagtgggcagctgtggtggtgccttctggagaggagcagagatacacgtgccatgtgcagcatgaggggctacccgagcccgtcaccctgagatggaagccggcttcccagcccaccatccccatcgtgggcatcattgctggcctggttctccttggatctgtggtctctggagctgtggttgctgctgtgatatggaggaagaagagctcaggtggaaaaggagggagctactctaaggctgagtggagcgacagtgcccaggggtctgagtctcacagcttgtaaagcctgagacagctgccttgtgtgcgactgagatgcacagctgccttgtgtgcgactgagatgcaggatttcctcacgcctcccctatgtgtcttaggggactctggcttctctttttgcaagggcctctgaatctgtctgtgtccctgttagcacaatgtgaggaggtagagaaacagtccacctctgtgtctaccatgacccccttcctcacactgacctgtgttccttccctgttctcttttctattaaaaataagaacctgggcagagtgcggcagctcatgcctgtaatcccagcacttagggaggccgaggagggcagatcacgaggtcaggagatcgaaaccatcctggctaacacggtgaaaccccgtctctactaaaaaatacaaaaaattagctgggcgcagaggcacgggcctgtagtcccagctactcaggaggcggaggcaggagaatggcgtcaacccgggaggcggaggttgcagtgagccaggattgtgcgactgcactccagcctgggtgacagggtgaaacgccatctcaaaaaataaaaatt

SEQ ID NO: 2010 - protein, 358 aa, Homo sapiens
MVDGTLLLLLSEALALTQTWAGSHSLKYFHTSVSRPGRGEPRFISVGYVDDTQFVRFDNDAASPRMVPRAPWMEQEGSEYWDRETRSARDTAQIFRVNLRTLRGYYNQSEAGSHTLQWMHGCELGPDGRFLRGYEQFAYDGKDYLTLNEDLRSWTAVDTAAQISEQKSNDASEAEHQRAYLEDTCVEWLHKYLEKGKETLLHLEPPKTHVTHHPISDHEATLRCWALGFYPAEITLTWQQDGEGHTQDTELVETRPAGDGTFQKWAAVVVPSGEEQRYTCHVQHEGLPEPVTLRWKPASQPTIPIVGIIAGLVLLGSVVSGAVVAAVIWRKKSSGGKGGSYSKAEWSDSAQGSESHSL

SEQ ID NO: 2011 - DNA, 2759 bp, Homo sapiens
aagagctcgttgattcctctgcaaggtggtgcagcatcctctgtcccttcattcatttcagatctactcaggtctccctgtaaacagatctctcggatcaataagcatgaatgacgaagactacagcaccatctatgacacaatccaaaatgagaggacgtatgaggttccagaccagccagaagaaaatgaaagtccccattatgatgatgtccatgagtacttaaggccagaaaatgatttatatgccactcagctgaatacccatgagtatgattttgtgtcagtctataccattaagggtgaagagaccagcttggcctctgtccagtcagaagacagaggctacctcctgcctgatgagatatactctgaactccaggaggctcatccaggtgagccccaggaggacaggggcatctcaatggaagggttatattcatcaacccaggaccagcaactctgcgcagcagaactccaggagaatgggagtgtgatgaaggaagatctgccttctccttcaagcttcaccattcagcacagtaaggccttctctaccaccaagtattcctgctattctgatgctgaaggtttggaagaaaaggagggagctcacatgaaccctgagatttacctctttgtgaaggctggaatcgatggagaaagcatcggcaactgtcctttctctcagcgcctcttcatgatcctctggctgaaaggagtcgtgttcaatgtcaccactgtggatctgaaaagaaagccagctgacctgcacaacctagcccccggcacgcacccgcccttcctgaccttcaacggggacgtgaagacagacgtcaataagatcgaggagttcctggaggagaccttgacccctgaaaagtaccccaaactggctgcaaaacaccgggaatccaacacagcgggcatcgacatcttttccaagttttctgcctacatcaaaaataccaagcagcagaacaatgctgctcttgaaagaggcctaaccaaggctctaaagaaattggatgactacctgaacacccctctaccagaggagattgacgccaacacttgtggggaagacaaggggtcccggcgcaagttcctggatggggatgagctgaccctggctgactgcaatctgttgcccaagctccatgtggtcaagattgtggccaagaaataccgcaactatgatatcccggctgagatgacaggcctgtggcggtacctcaagaacgcctatgcccgtgatgagttcaccaacacctgtgcagctgacagtgagatcgagttggcctacgctgatgtcgccaaacgcctcagccgatcctgagcacagccattttgccccatccccgctgcagaaggactcaaccactcccctaagactccagcttcatagactcctctgtatcactgccttgaggcgcactttttataatcaagcctcatcttgctggtatcatgggaactccagcctgctatctttcatgaaggtcagcaccatccctggcctcctcacataggaatctagcagaaatgatagacacagtccacctttcggccggccagcctgatctgggctcagcatgtttggggtcagtcagtgttggagagcccacatatgggattgccactagcttcttctgccaatatcaaaataccttctcagatgctttagaaacatgcaacaccaactccttttctaccctcctctccgtccatacctacaaggccaaggacaaacgccatcttcatccttcttagaaagagatctattaccccattaggggagacagagagagtgaatggaggagtaccgagctggctatggacttgggtgtctggcaaacacagcttcagtctcactacttctgacactctggttattgggcactaagggccagactggaaagtcacttgagacacattctcagtttgttgcagtgccaggaatgctgcgctgctgctgctgcgcacctggcccatgctgtccctggcttccatgccgtccaggccctgccagaaaaggaaattggcatgcaattctaaactgcagtgactgggatgggaggggaggggagcagtgttgatgccaaaatacccacggggtctaccagccatggggtttgcttgcttaggagtagttgtttcagaggtgattacaggcctgggtttgactgtgcttaccaatgagtggtttttgagctatgagaaagtggatgggagtgggaggaggagagatgggtgaagacaaaagagttctttatgagcctcgatgttccctggtaaacttttaaaaaggccttctctcatgatctaagtcttggactggtggcatcatgtaactgctaaccttacagtaaaaacccaagaatgggtcaaaaatgtcttcccagtttctccaagctgcttctggaatgcaggtctgtcggctgggtgctctccagcagctgctcctgcctgattcaactgtagcctgtaatgggtaaaagccacatttaggaggtggtctgatcatagaacaccttaggaagaaagtccatgagactttctgactaggaaaccatgtggtttgaacttgaagaaaaatgtagacccatctgggttaattttcctacaatctgactcaactgccaggtgaaaaaaaaaaggaaaaatttttaagctaatatttcactcttttgtcattctccttaagtttcatctcctaaaaagcttacccagcctgagcttggggacctgtgcagagg

SEQ ID NO: 2012 - protein, 410 aa, Homo sapiens
MNDEDYSTIYDTIQNERTYEVPDQPEENESPHYDDVHEYLRPENDLYATQLNTHEYDFVSVYTIKGEETSLASVQSEDRGYLLPDEIYSELQEAHPGEPQEDRGISMEGLYSSTQDQQLCAAELQENGSVMKEDLPSPSSFTIQHSKAFSTTKYSCYSDAEGLEEKEGAHMNPEIYLFVKAGIDGESIGNCPFSQRLFMILWLKGVVFNVTTVDLKRKPADLHNLAPGTHPPFLTFNGDVKTDVNKIEEFLEETLTPEKYPKLAAKHRESNTAGIDIFSKFSAYIKNTKQQNNAALERGLTKALKKLDDYLNTPLPEEIDANTCGEDKGSRRKFLDGDELTLADCNLLPKLHVVKIVAKKYRNYDIPAEMTGLWRYLKNAYARDEFTNTCAADSEIELAYADVAKRLSRS

SEQ ID NO: 2013 - DNA, 2379 bp, Homo sapiens
gacagtcgcggatcctgtgacacctccgggcagcccggcacttgttgctcccacgacctgttgtcattcccttaacccggctttccccgtggccccccgcctcctcccggcttcgctccttttcatgtgagcatctgggacactgatctctcagaccccgctgctcgggctggagaatagatggttttgtgaaaaattaaacaccgccctgaagaggagccccgctgggcagcggcaggagcgcagagtgctggcccaggtgctgcagaggtggcgcctccccggcccgggacggtagccccgggcgccaacggcatgacagactcggcgacagctaacggggacgacagggaccccgagatcgagctctttgtgaaggctggaatcgatggagaaagcatcggcaactgtcctttctctcagcgcctcttcatgatcctctggctgaaaggagtcgtgttcaatgtcaccactgtggatctgaaaagaaagccagctgacctgcacaacctagcccccggcacgcacccgcccttcctgaccttcaacggggacgtgaagacagacgtcaataagatcgaggagttcctggaggagaccttgacccctgaaaagtaccccaaactggctgcaaaacaccgggaatccaacacagcgggcatcgacatcttttccaagttttctgcctacatcaaaaataccaagcagcagaacaatgctgctcttgaaagaggcctaaccaaggctctaaagaaattggatgactacctgaacacccctctaccagaggagattgacgccaacacttgtggggaagacaaggggtcccggcgcaagttcctggatggggatgagctgaccctggctgactgcaatctgttgcccaagctccatgtggtcaagattgtggccaagaaataccgcaactatgatatcccggctgagatgacaggcctgtggcggtacctcaagaacgcctatgcccgtgatgagttcaccaacacctgtgcagctgacagtgagatcgagttggcctacgctgatgtcgccaaacgcctcagccgatcctgagcacagccattttgccccatccccgctgcagaaggactcaaccactcccctaagactccagcttcatagactcctctgtatcactgccttgaggcgcactttttataatcaagcctcatcttgctggtatcatgggaactccagcctgctatctttcatgaaggtcagcaccatccctggcctcctcacataggaatctagcagaaatgatagacacagtccacctttcggccggccagcctgatctgggctcagcatgtttggggtcagtcagtgttggagagcccacatatgggattgccactagcttcttctgccaatatcaaaataccttctcagatgctttagaaacatgcaacaccaactccttttctaccctcctctccgtccatacctacaaggccaaggacaaacgccatcttcatccttcttagaaagagatctattaccccattaggggagacagagagagtgaatggaggagtaccgagctggctatggacttgggtgtctggcaaacacagcttcagtctcactacttctgacactctggttattgggcactaagggccagactggaaagtcacttgagacacattctcagtttgttgcagtgccaggaatgctgcgctgctgctgctgcgcacctggcccatgctgtccctggcttccatgccgtccaggccctgccagaaaaggaaattggcatgcaattctaaactgcagtgactgggatgggaggggaggggagcagtgttgatgccaaaatacccacggggtctaccagccatggggtttgcttgcttaggagtagttgtttcagaggtgattacaggcctgggtttgactgtgcttaccaatgagtggtttttgagctatgagaaagtggatgggagtgggaggaggagagatgggtgaagacaaaagagttctttatgagcctcgatgttccctggtaaacttttaaaaaggccttctctcatgatctaagtcttggactggtggcatcatgtaactgctaaccttacagtaaaaacccaagaatgggtcaaaaatgtcttcccagtttctccaagctgcttctggaatgcaggtctgtcggctgggtgctctccagcagctgctcctgcctgattcaactgtagcctgtaatgggtaaaagccacatttaggaggtggtctgatcatagaacaccttaggaagaaagtccatgagactttctgactaggaaaccatgtggtttgaacttgaagaaaaatgtagacccatctgggttaattttcctacaatctgactcaactgccagg

SEQ ID NO: 2014 - protein, 251 aa, Homo sapiens
MTDSATANGDDRDPEIELFVKAGIDGESIGNCPFSQRLFMILWLKGVVFNVTTVDLKRKPADLHNLAPGTHPPFLTFNGDVKTDVNKIEEFLEETLTPEKYPKLAAKHRESNTAGIDIFSKFSAYIKNTKQQNNAALERGLTKALKKLDDYLNTPLPEEIDANTCGEDKGSRRKFLDGDELTLADCNLLPKLHVVKIVAKKYRNYDIPAEMTGLWRYLKNAYARDEFTNTCAADSEIELAYADVAKRLSRS

SEQ ID NO: 2015 - DNA, 1990 bp, Homo sapiens
gcagcccggcacttgttgctcccacgacctgttgtcattcccttaacccggctttccccgtggccccccgcctcctcccggcttcgctccttttcatgtgagcatctgggacactgatctctcagaccccgctgctcgggctggagaatagatggttttgtgaaaaattaaacaccgccctgaagaggagccccgctgggcagcggcaggagcgcagagtgctggcccaggtgctgcagaggtggcgcctccccggcccgggacggtagccccgggcgccaacggcatgacagactcggcgacagctaacggggacgacagggaccccgagatcgagctctttgtgaaggctggaatcgatggagaaagcatcggcaactgtcctttctctcagcgcctcttcatgatcctctggctgaaaggagtcgtgttcaatgtcaccactgtggatctgaaaagaaagccagctgacctgcacaacctagcccccggcacgcacccgcccttcctgaccttcaacggggacgtgaagacagacgtcaataagatcgaggagttcctggaggagaccttgacccctgaaaagtaccccaaactggctgcaaaacaccgggaatccaacacagcgggcatcgacatcttttccaagttttctgcctacatcaaaaataccaagcagcagaacaatgctgctcttgaaagaggcctaaccaaggctctaaagaaattggatgactacctgaacacccctctaccagaggagattgacgccaacacttgtggggaagacaaggggtcccggcgcaagttcctggatggggatgagctgaccctggctgactgcaatctgttgcccaagctccatgtggtcaaggaacaagtaccactgaaagggatgatataattccagctcagtcacactgtgtcagagtgatacaatgcaaagatcaggagacccgagttccggtcctgtatttgctgccaactagcagcatgagctgaggcacatcatttaatctttttggaattcatttttctcatgcctagaagaacagaagtggattgtattccttcttgccttcttttcctttcttctttccctccttctttccttttctcttgctcaaacatgtattcactaccactcaaaaaccatttgttgaacaaagcaaacaaatgaatctcccaagccttgggcttcatcctgtgatttcctcaattcccacctgccttaaattactcagtgaagccctgtccttggagaaaattcagtgggtggttaacccagagaagctggagatcaaaaagaagatggccaatgaaagaacaaaggccagcccttggcccctatctctttggatttctgctgatccagcttatcagatcccagaaacctggcaaacctctaaagttcacaaagagcgaaggggaagccaagtcaggcctccagtttggcttcggatgccaaaacttaatctgggctgtgggagctaactgttttcatatgaaagagcaaattcagaacatgagcatggaagtccctgcgaacgtcagatctccgtgtgcatccttacccccttgctgctttcatgctcactctcctcttgcgtggctcgctttcaggtttatctccatccctggaagcagagttgctctggcccaggctctccatgagagtttggcttgaacattcattgtctggccccctcctagttctcatctcccaaagtcaagccaatgtgtgaagaaatgaccagctcagcagccaaggcccagggtgcacaggtcttcgttgggagaggcatctgcaggcctttccttgctcactgggatccttgcctagcatagtgacgatgttcagccctggagacaaacaagaaggggaacaccaacatcaatagaagtatatatttacaaattgcatttctgctgtattgaaactaacattctgccctttaaaatcctgaaaataaaatttcagtatgaaatg

SEQ ID NO: 2016 - protein, 205 aa, Homo sapiens
MTDSATANGDDRDPEIELFVKAGIDGESIGNCPFSQRLFMILWLKGVVFNVTTVDLKRKPADLHNLAPGTHPPFLTFNGDVKTDVNKIEEFLEETLTPEKYPKLAAKHRESNTAGIDIFSKFSAYIKNTKQQNNAALERGLTKALKKLDDYLNTPLPEEIDANTCGEDKGSRRKFLDGDELTLADCNLLPKLHVVKEQVPLKGMI

SEQ ID NO: 2017 - DNA, 6602 bp, Homo sapiens
atgtccaaaagcttgaaaaagaaaagccactggactagcaaagtccatgagagtgtcattggcaggaacccggagggccagctgggctttgaactgaaggggggcgccgagaatggacagttcccctacctgggggaggtgaagcccggcaaggtggcctatgagagcggcagcaaattggtgtcggaggagctgctgctggaggtgaacgagacccccgtggcggggctcaccatcagggacgtgctggccgtgatcaaacactgcaaggaccccctccggctcaagtgtgtcaagcaaggaggaattgttgataaagaccttcgtcactacctcaacttacgatttcaaaagggttctgtggaccatgagcttcagcaaatcattcgtgacaacctctacctccgcacggtgccatgcaccacaaggccacataaggagggtgaggtccctggagtggattatattttcatcactgttgaagattttatggaattggagaaaagtggtgctctcctagaaagtgggacttatgaagacaattactacggtaccccaaagccgccagcagaaccagcaccattattgttaaatgtaacagaccagatacttccaggagccactccaagtgctgaaggaaaacggaagaggaataaatcagtgagcaacatggagaaagccagtatagagcctcctgaggaggaagaggaagagaggcctgtggtcaatggaaatggagtagtagtaacaccagaatccagtgaacatgaagacaaaagtgcaggtgcctcaggggagatgccctcccagccttatcctgcaccagtgtacagtcagcctgaggagctgaaggagcagatggatgacacaaagccaactaaacctgaagacaatgaggaaccagacccattgcctgataactgggaaatggcctatacagagaagggcgaagtctacttcattgaccataacacaaagacaacatcatggctggatccacgacttgcgaaaaaggctaaacctccagaagagtgcaaagaaaatgagcttccatatggctgggaaaaaatcgatgatcccatttatggcacttattatgttgaccacataaatagaagaacacagtttgaaaatcctgtcctggaagcaaaaaggaagctacagcaacataacatgccccacacagaacttggaacaaagcccctgcaggccccaggtttccgagaaaaaccactcttcacccgggatgcatcccagttgaagggaacattcctcagcaccaccctaaaaaagagcaacatgggctttggatttaccatcattggtggagacgagcctgatgagtttctgcaggtgaaaagtgtgattccggatgggcctgcagcacaggatggaaaaatggaaacaggtgatgtcattgtctatattaatgaagtttgtgtccttggacacactcatgcagatgttgtcaaacttttccagtctgttcctattggtcagagtgtcaacctggtgttgtgtcgtggctaccctttgccctttgatcctgaagaccctgctaacagcatggtgccaccccttgcaataatggagaggccacctccagtgatggtcaatggaagacacaactatgaaacatatttggagtacatttctcggacctcacagtcagttccagatataacagatcggccgcctcattctctgcactccatgccaactgatggtcagctagacggcacgtatccaccgcccgtccatgatgacaatgtgtctatggcttcatctggggccacccaagctgaacttatgaccttaaccattgtgaaaggtgcccagggcttcggcttcactattgccgacagtcctacaggacagcgggtgaaacaaatacttgacattcagggatgccctggcctgtgtgaaggcgacctcattgttgagatcaaccagcagaatgtacagaacctgagccatacagaagtagtggatatacttaaggactgtcccattggaagtgaaacttctttgattatccatcgaggaggtttcttttctccatggaaaactccaaagcctataatggaccgatgggagaatcaaggcagtcctcaaacgagtttatctgctccggccataccgcagaacctgcccttcccacctgcccttcacaggagctcctttcctgactcaacagaggcctttgacccacggaagcctgatccatatgagctctacgagaaatctagggccatttatgaaagtaggcaacaagtgccacccaggaccagttttcgaatggattcctctggtccagattataaggaattggatgttcatcttcggaggatggagtctggatttggcttcagaatcctcgggggagatgagcctggacagcctattttgattggagctgtcattgccatgggctcagccgacagagatggccgccttcacccaggagatgagcttgtgtatgttgatgggattccagtagccggcaaaacccaccgctatgtcatcgacctcatgcaccacgcagcccgcaatgggcaggtcaacctcactgtgagaagaaaggtgctatgtggaggggagccctgcccagagaacgggagaagtccaggctctgtatccacccaccacagctctccacgcagtgactacgcaacctacaccaacagcaaccacgctgcccccagtagcaatgcctctccccctgaaggcttcgcctcccacagcctgcagaccagtgatgtggtcattcaccgcaaagagaatgagggcttcggctttgtcatcatcagctccctgaacaggcctgagtctggatccactataactgtgccccataaaatcggacgcatcattgatgggagtcctgcagatcgctgtgcaaaactaaaagtgggagaccggatcctagcagtgaatggccagtctatcatcaacatgcctcacgctgacatcgtgaagctcatcaaggatgcaggtcttagtgtcacccttcgcatcattcctcaggaggagctcaacagccccacctcggcacccagctcagagaagcagagtcccatggcgcagcagagtcccctggcacagcagagtcccctggcccagccaagcccagccacccccaacagccccatcgcccagccagcaccacctcaaccacttcagctgcaaggacacgaaaatagttacaggtcggaagtgaaagcaaggcaagatgtgaaaccagacatccgacagcctccattcacagactacaggcagcccccgctggattacaggcaacccccaggaggggactaccagcagcccccacccttggactacaggcagcctcccctactggactacaggcagcactcccccgacaccaggcagtaccctctgtcggactacagacaaccccaggattttgattatttcactgtggacatggagaaaggagccaaaggatttggattcagcattcgtggaggaagggaatacaaaatggatttgtatgtgttgagactggcagaagatggaccagcaataaggaatgggaggatgagggtaggagatcaaatcattgaaatcaatggggaaagcacaagggacatgacacatgccagagcaatagaactcatcaaatctggaggaagacgagtgaggctgctgctcaagagaggcacgggacaggtcccagaatatgacgaacccgccccctggagttctcccgctgccgccgccccaggtctgccggaagtaggcgtctccctggacgacggcctcgctccattctctccatcacatccagccccaccctccgacccttcccaccagataagcccaggcccaacttgggatatcaaacgggaacacgacgttaggaaaccaaaggagctttcagcctgcggccagaagaagcagcgcctcggggagcagagggagcgctcggcgagtccgcagagggccgcgcggccgaggctcgaggaggcgcccggcggccaggggcggcccgaggccggcaggcccgcctcggaggccagggcgcccgggctcgcggcggcagacgcggcggacgcggcgcgggcgggcgggaaggaggcgccccgtgcggcggcgggctccgagctctgccggcgcgaaggcccgggggctgcgccggcgtttgccggcccgggcggcggcggcagcggcgcgctggaggccgagggcagggcgggtgcgcgcgcgggtccccggccgggcccgcgacccccggggggcgccccggcgcgcaaggccgccgtcgcgccggggccctggaaggtgccgggttctgacaagctgcccagcgtcctcaaacccggcgcctcggccgccagcagatgagccgcgcggccacggccaacccgcccgccccggcgcaggcagttcttcttaggttccgtctcacggcgttttaatttattttcactgtcacacgcatagatccacgaggcaccaaggcctgggagcatcgacgtgaagtcccacgtgtccggtgtgcttgggcggcatcgcatcaacgcgcagacctaaactgatcctaaagcccccggttcccttgtgggggctttggcagctatggaagaaccaaaataacgtgaagaacatcacagagagacagtgcagtgtagctttagtttaagaaaaaaaaatattcctccccactgcatgaaggacttggatgtcatccaaactttatatcaagaaacaggacaaagttaagagcaatcacaaactggaatatcgccttaaaaatcaaactgcacggagcaagctgaaactgagacaagattatatcttttaattgatctaaagcgttgtaaataaattgttctcgacatatctagacaggggttaaagggtttctttgacacattcggaaccgttcacccatgacatgtttccatggctcacccttggcatccatcctcggtgttagcagcagcgttccctgcctcctgcaggatgacttagaaatctagtgagtttcttggtgtgatgccatttttattgccctttctgtgatcaaatcatatttctgtacattttcagtggtagaaaaaaaaggttttaaaaattgtatcctagggaacagtttgccataagtcagaattttgcagtttagctcatagatcttaattggtttttctctaaaatatgaattttataattgaaggaccacaatttgtttaatcaagataggcaacgctgcagttcctttatgaagaggcttttctgtcgtcccaggctagcagagatggatagcttctttgtcagcaatgtgatttcacttattttattgtcttattttaaaccctgtctccatgacttcatttgcactttgacagagcagaggcagagtatttgtcttatatttctcagattataatattaaaaaattacaatcaatttattttcattaaagaacgtgagtctttttagcattcctttctgcttatccttctttccttaccctttgtccttttgtttccattagttttctttcgtcttgtattccttgccactttattttgttagcaacttctagatgtttatcttcatggatctatgattgacctcctagtaaaattctaagtcttgcctttcttccctgctgttttagcatttctttgtaaaatgttagcttcaattaattagccattggtacttactgtagctacacatattaaaaggcaaagtgtttctgaaggcaatttctttttaatatgcccgaatgaatgaggcttcatcctttccatattcttactctttacaggagttcaaatgcaaataagctccacctccctgcacttgtagtctaaaaagtaaaaggggcgatcaggtccatctcaaaggtcacacgtaatagcctccctgggctgatcattccctctccttgtaattgcagtatcctgagtagcagtttaattttcatcaaacatcggagtagtttagttgtttgacaggaggagaataaggctgaaagcctcaagtgaaggatcttgcagcttgtaaaagcaatttccaaaaatgaaacccattcatcgtaaacaaaagcacaaacacttgtagcagtttataatgcttttggtttaatctcaattagtctttctcccctggactagaaatccagtatagtttgccattaatttattgaatctggttttggacaatgcttctgtagtgtagctgcacgtcctggtactgtatcctctgactttattttccatgtattacaaaaggaaaaaaaaattgagattacactggcataaactctagtttgcacagttcacagctactacttgtgcagtaattgctttatgcggctgtaatccataacctgtgaagacagcacatcatctaaatcccattccaaataatatttgtgtagtgttagctgtgaatttaccctgtacagctgtatctctataaatataattccatgtattaatagtcacagaaagactgtaagtgagcaactatttttatgaaacgtaccactatggataaattaacttttacagaaatcttgtttactgtatgatattctaaaacactgtcaaataaaatatatatcc

SEQ ID NO: 2018 - protein, 1455 aa, Homo sapiens
MSKSLKKKSHWTSKVHESVIGRNPEGQLGFELKGGAENGQFPYLGEVKPGKVAYESGSKLVSEELLLEVNETPVAGLTIRDVLAVIKHCKDPLRLKCVKQGGIVDKDLRHYLNLRFQKGSVDHELQQIIRDNLYLRTVPCTTRPHKEGEVPGVDYIFITVEDFMELEKSGALLESGTYEDNYYGTPKPPAEPAPLLLNVTDQILPGATPSAEGKRKRNKSVSNMEKASIEPPEEEEEERPVVNGNGVVVTPESSEHEDKSAGASGEMPSQPYPAPVYSQPEELKEQMDDTKPTKPEDNEEPDPLPDNWEMAYTEKGEVYFIDHNTKTTSWLDPRLAKKAKPPEECKENELPYGWEKIDDPIYGTYYVDHINRRTQFENPVLEAKRKLQQHNMPHTELGTKPLQAPGFREKPLFTRDASQLKGTFLSTTLKKSNMGFGFTIIGGDEPDEFLQVKSVIPDGPAAQDGKMETGDVIVYINEVCVLGHTHADVVKLFQSVPIGQSVNLVLCRGYPLPFDPEDPANSMVPPLAIMERPPPVMVNGRHNYETYLEYISRTSQSVPDITDRPPHSLHSMPTDGQLDGTYPPPVHDDNVSMASSGATQAELMTLTIVKGAQGFGFTIADSPTGQRVKQILDIQGCPGLCEGDLIVEINQQNVQNLSHTEVVDILKDCPIGSETSLIIHRGGFFSPWKTPKPIMDRWENQGSPQTSLSAPAIPQNLPFPPALHRSSFPDSTEAFDPRKPDPYELYEKSRAIYESRQQVPPRTSFRMDSSGPDYKELDVHLRRMESGFGFRILGGDEPGQPILIGAVIAMGSADRDGRLHPGDELVYVDGIPVAGKTHRYVIDLMHHAARNGQVNLTVRRKVLCGGEPCPENGRSPGSVSTHHSSPRSDYATYTNSNHAAPSSNASPPEGFASHSLQTSDVVIHRKENEGFGFVIISSLNRPESGSTITVPHKIGRIIDGSPADRCAKLKVGDRILAVNGQSIINMPHADIVKLIKDAGLSVTLRIIPQEELNSPTSAPSSEKQSPMAQQSPLAQQSPLAQPSPATPNSPIAQPAPPQPLQLQGHENSYRSEVKARQDVKPDIRQPPFTDYRQPPLDYRQPPGGDYQQPPPLDYRQPPLLDYRQHSPDTRQYPLSDYRQPQDFDYFTVDMEKGAKGFGFSIRGGREYKMDLYVLRLAEDGPAIRNGRMRVGDQIIEINGESTRDMTHARAIELIKSGGRRVRLLLKRGTGQVPEYDEPAPWSSPAAAAPGLPEVGVSLDDGLAPFSPSHPAPPSDPSHQISPGPTWDIKREHDVRKPKELSACGQKKQRLGEQRERSASPQRAARPRLEEAPGGQGRPEAGRPASEARAPGLAAADAADAARAGGKEAPRAAAGSELCRREGPGAAPAFAGPGGGGSGALEAEGRAGARAGPRPGPRPPGGAPARKAAVAPGPWKVPGSDKLPSVLKPGASAASR

SEQ ID NO: 2019 - DNA, 6611 bp, Homo sapiens
atgtccaaaagcttgaaaaagaaaagccactggactagcaaagtccatgagagtgtcattggcaggaacccggagggccagctgggctttgaactgaaggggggcgccgagaatggacagttcccctacctgggggaggtgaagcccggcaaggtggcctatgagagcggcagcaaattggtgtcggaggagctgctgctggaggtgaacgagacccccgtggcggggctcaccatcagggacgtgctggccgtgatcaaacactgcaaggaccccctccggctcaagtgtgtcaagcaaggaggaattgttgataaagaccttcgtcactacctcaacttacgatttcaaaagggttctgtggaccatgagcttcagcaaatcattcgtgacaacctctacctccgcacggtgccatgcaccacaaggccacataaggagggtgaggtccctggagtggattatattttcatcactgttgaagattttatggaattggagaaaagtggtgctctcctagaaagtgggacttatgaagacaattactacggtaccccaaagccgccagcagaaccagcaccattattgttaaatgtaacagaccagatacttccaggagccactccaagtgctgaaggaaaacggaagaggaataaatcagtgagcaacatggagaaagccagtatagagcctcctgaggaggaagaggaagagaggcctgtggtcaatggaaatggagtagtagtaacaccagaatccagtgaacatgaagacaaaagtgcaggtgcctcaggggagatgccctcccagccttatcctgcaccagtgtacagtcagcctgaggagctgaaggagcagatggatgacacaaagccaactaaacctgaagacaatgaggaaccagacccattgcctgataactgggaaatggcctatacagagaagggcgaagtctacttcattgaccataacacaaagacaacatcatggctggatccacgacttgcgaaaaaggctaaacctccagaagagtgcaaagaaaatgagcttccatatggctgggaaaaaatcgatgatcccatttatggcacttattatgttgaccacataaatagaagaacacagtttgaaaatcctgtcctggaagcaaaaaggaagctacagcaacataacatgccccacacagaacttggaacaaagcccctgcaggccccaggtttccgagaaaaaccactcttcacccgggatgcatcccagttgaagggaacattcctcagcaccaccctaaaaaagagcaacatgggctttggatttaccatcattggtggagacgagcctgatgagtttctgcaggtgaaaagtgtgattccggatgggcctgcagcacaggatggaaaaatggaaacaggtgatgtcattgtctatattaatgaagtttgtgtccttggacacactcatgcagatgttgtcaaacttttccagtctgttcctattggtcagagtgtcaacctggtgttgtgtcgtggctaccctttgccctttgatcctgaagaccctgctaacagcatggtgccaccccttgcaataatggagaggccacctccagtgatggtcaatggaagacacaactatgaaacatatttggagtacatttctcggacctcacagtcagttccagatataacagatcggccgcctcattctctgcactccatgccaactgatggtcagctagacggcacgtatccaccgcccgtccatgatgacaatgtgtctatggcttcatctggggccacccaagctgaacttatgaccttaaccattgtgaaaggtgcccagggcttcggcttcactattgccgacagtcctacaggacagcgggtgaaacaaatacttgacattcagggatgccctggcctgtgtgaaggcgacctcattgttgagatcaaccagcagaatgtacagaacctgagccatacagaagtagtggatatacttaaggactgtcccattggaagtgaaacttctttgattatccatcgaggaggtttcttttctccatggaaaactccaaagcctataatggaccgatgggagaatcaaggcagtcctcaaacgagtttatctgctccggccataccgcagaacctgcccttcccacctgcccttcacaggagctcctttcctgactcaacagaggcctttgacccacggaagcctgatccatatgagctctacgagaaatctagggccatttatgaaagtaggcaacaagtgccacccaggaccagttttcgaatggattcctctggcaagtattgtccagattataaggaattggatgttcatcttcggaggatggagtctggatttggcttcagaatcctcgggggagatgagcctggacagcctattttgattggagctgtcattgccatgggctcagccgacagagatggccgccttcacccaggagatgagcttgtgtatgttgatgggattccagtagccggcaaaacccaccgctatgtcatcgacctcatgcaccacgcagcccgcaatgggcaggtcaacctcactgtgagaagaaaggtgctatgtggaggggagccctgcccagagaacgggagaagtccaggctctgtatccacccaccacagctctccacgcagtgactacgcaacctacaccaacagcaaccacgctgcccccagtagcaatgcctctccccctgaaggcttcgcctcccacagcctgcagaccagtgatgtggtcattcaccgcaaagagaatgagggcttcggctttgtcatcatcagctccctgaacaggcctgagtctggatccactataactgtgccccataaaatcggacgcatcattgatgggagtcctgcagatcgctgtgcaaaactaaaagtgggagaccggatcctagcagtgaatggccagtctatcatcaacatgcctcacgctgacatcgtgaagctcatcaaggatgcaggtcttagtgtcacccttcgcatcattcctcaggaggagctcaacagccccacctcggcacccagctcagagaagcagagtcccatggcgcagcagagtcccctggcacagcagagtcccctggcccagccaagcccagccacccccaacagccccatcgcccagccagcaccacctcaaccacttcagctgcaaggacacgaaaatagttacaggtcggaagtgaaagcaaggcaagatgtgaaaccagacatccgacagcctccattcacagactacaggcagcccccgctggattacaggcaacccccaggaggggactaccagcagcccccacccttggactacaggcagcctcccctactggactacaggcagcactcccccgacaccaggcagtaccctctgtcggactacagacaaccccaggattttgattatttcactgtggacatggagaaaggagccaaaggatttggattcagcattcgtggaggaagggaatacaaaatggatttgtatgtgttgagactggcagaagatggaccagcaataaggaatgggaggatgagggtaggagatcaaatcattgaaatcaatggggaaagcacaagggacatgacacatgccagagcaatagaactcatcaaatctggaggaagacgagtgaggctgctgctcaagagaggcacgggacaggtcccagaatatgacgaacccgccccctggagttctcccgctgccgccgccccaggtctgccggaagtaggcgtctccctggacgacggcctcgctccattctctccatcacatccagccccaccctccgacccttcccaccagataagcccaggcccaacttgggatatcaaacgggaacacgacgttaggaaaccaaaggagctttcagcctgcggccagaagaagcagcgcctcggggagcagagggagcgctcggcgagtccgcagagggccgcgcggccgaggctcgaggaggcgcccggcggccaggggcggcccgaggccggcaggcccgcctcggaggccagggcgcccgggctcgcggcggcagacgcggcggacgcggcgcgggcgggcgggaaggaggcgccccgtgcggcggcgggctccgagctctgccggcgcgaaggcccgggggctgcgccggcgtttgccggcccgggcggcggcggcagcggcgcgctggaggccgagggcagggcgggtgcgcgcgcgggtccccggccgggcccgcgacccccggggggcgccccggcgcgcaaggccgccgtcgcgccggggccctggaaggtgccgggttctgacaagctgcccagcgtcctcaaacccggcgcctcggccgccagcagatgagccgcgcggccacggccaacccgcccgccccggcgcaggcagttcttcttaggttccgtctcacggcgttttaatttattttcactgtcacacgcatagatccacgaggcaccaaggcctgggagcatcgacgtgaagtcccacgtgtccggtgtgcttgggcggcatcgcatcaacgcgcagacctaaactgatcctaaagcccccggttcccttgtgggggctttggcagctatggaagaaccaaaataacgtgaagaacatcacagagagacagtgcagtgtagctttagtttaagaaaaaaaaatattcctccccactgcatgaaggacttggatgtcatccaaactttatatcaagaaacaggacaaagttaagagcaatcacaaactggaatatcgccttaaaaatcaaactgcacggagcaagctgaaactgagacaagattatatcttttaattgatctaaagcgttgtaaataaattgttctcgacatatctagacaggggttaaagggtttctttgacacattcggaaccgttcacccatgacatgtttccatggctcacccttggcatccatcctcggtgttagcagcagcgttccctgcctcctgcaggatgacttagaaatctagtgagtttcttggtgtgatgccatttttattgccctttctgtgatcaaatcatatttctgtacattttcagtggtagaaaaaaaaggttttaaaaattgtatcctagggaacagtttgccataagtcagaattttgcagtttagctcatagatcttaattggtttttctctaaaatatgaattttataattgaaggaccacaatttgtttaatcaagataggcaacgctgcagttcctttatgaagaggcttttctgtcgtcccaggctagcagagatggatagcttctttgtcagcaatgtgatttcacttattttattgtcttattttaaaccctgtctccatgacttcatttgcactttgacagagcagaggcagagtatttgtcttatatttctcagattataatattaaaaaattacaatcaatttattttcattaaagaacgtgagtctttttagcattcctttctgcttatccttctttccttaccctttgtccttttgtttccattagttttctttcgtcttgtattccttgccactttattttgttagcaacttctagatgtttatcttcatggatctatgattgacctcctagtaaaattctaagtcttgcctttcttccctgctgttttagcatttctttgtaaaatgttagcttcaattaattagccattggtacttactgtagctacacatattaaaaggcaaagtgtttctgaaggcaatttctttttaatatgcccgaatgaatgaggcttcatcctttccatattcttactctttacaggagttcaaatgcaaataagctccacctccctgcacttgtagtctaaaaagtaaaaggggcgatcaggtccatctcaaaggtcacacgtaatagcctccctgggctgatcattccctctccttgtaattgcagtatcctgagtagcagtttaattttcatcaaacatcggagtagtttagttgtttgacaggaggagaataaggctgaaagcctcaagtgaaggatcttgcagcttgtaaaagcaatttccaaaaatgaaacccattcatcgtaaacaaaagcacaaacacttgtagcagtttataatgcttttggtttaatctcaattagtctttctcccctggactagaaatccagtatagtttgccattaatttattgaatctggttttggacaatgcttctgtagtgtagctgcacgtcctggtactgtatcctctgactttattttccatgtattacaaaaggaaaaaaaaattgagattacactggcataaactctagtttgcacagttcacagctactacttgtgcagtaattgctttatgcggctgtaatccataacctgtgaagacagcacatcatctaaatcccattccaaataatatttgtgtagtgttagctgtgaatttaccctgtacagctgtatctctataaatataattccatgtattaatagtcacagaaagactgtaagtgagcaactatttttatgaaacgtaccactatggataaattaacttttacagaaatcttgtttactgtatgatattctaaaacactgtcaaataaaatatatatcc

SEQ ID NO: 2020 - protein, 1458 aa, Homo sapiens
MSKSLKKKSHWTSKVHESVIGRNPEGQLGFELKGGAENGQFPYLGEVKPGKVAYESGSKLVSEELLLEVNETPVAGLTIRDVLAVIKHCKDPLRLKCVKQGGIVDKDLRHYLNLRFQKGSVDHELQQIIRDNLYLRTVPCTTRPHKEGEVPGVDYIFITVEDFMELEKSGALLESGTYEDNYYGTPKPPAEPAPLLLNVTDQILPGATPSAEGKRKRNKSVSNMEKASIEPPEEEEEERPVVNGNGVVVTPESSEHEDKSAGASGEMPSQPYPAPVYSQPEELKEQMDDTKPTKPEDNEEPDPLPDNWEMAYTEKGEVYFIDHNTKTTSWLDPRLAKKAKPPEECKENELPYGWEKIDDPIYGTYYVDHINRRTQFENPVLEAKRKLQQHNMPHTELGTKPLQAPGFREKPLFTRDASQLKGTFLSTTLKKSNMGFGFTIIGGDEPDEFLQVKSVIPDGPAAQDGKMETGDVIVYINEVCVLGHTHADVVKLFQSVPIGQSVNLVLCRGYPLPFDPEDPANSMVPPLAIMERPPPVMVNGRHNYETYLEYISRTSQSVPDITDRPPHSLHSMPTDGQLDGTYPPPVHDDNVSMASSGATQAELMTLTIVKGAQGFGFTIADSPTGQRVKQILDIQGCPGLCEGDLIVEINQQNVQNLSHTEVVDILKDCPIGSETSLIIHRGGFFSPWKTPKPIMDRWENQGSPQTSLSAPAIPQNLPFPPALHRSSFPDSTEAFDPRKPDPYELYEKSRAIYESRQQVPPRTSFRMDSSGKYCPDYKELDVHLRRMESGFGFRILGGDEPGQPILIGAVIAMGSADRDGRLHPGDELVYVDGIPVAGKTHRYVIDLMHHAARNGQVNLTVRRKVLCGGEPCPENGRSPGSVSTHHSSPRSDYATYTNSNHAAPSSNASPPEGFASHSLQTSDVVIHRKENEGFGFVIISSLNRPESGSTITVPHKIGRIIDGSPADRCAKLKVGDRILAVNGQSIINMPHADIVKLIKDAGLSVTLRIIPQEELNSPTSAPSSEKQSPMAQQSPLAQQSPLAQPSPATPNSPIAQPAPPQPLQLQGHENSYRSEVKARQDVKPDIRQPPFTDYRQPPLDYRQPPGGDYQQPPPLDYRQPPLLDYRQHSPDTRQYPLSDYRQPQDFDYFTVDMEKGAKGFGFSIRGGREYKMDLYVLRLAEDGPAIRNGRMRVGDQIIEINGESTRDMTHARAIELIKSGGRRVRLLLKRGTGQVPEYDEPAPWSSPAAAAPGLPEVGVSLDDGLAPFSPSHPAPPSDPSHQISPGPTWDIKREHDVRKPKELSACGQKKQRLGEQRERSASPQRAARPRLEEAPGGQGRPEAGRPASEARAPGLAAADAADAARAGGKEAPRAAAGSELCRREGPGAAPAFAGPGGGGSGALEAEGRAGARAGPRPGPRPPGGAPARKAAVAPGPWKVPGSDKLPSVLKPGASAASR

SEQ ID NO: 2021 - DNA, 4326 bp, Homo sapiens
atgtccaaaagcttgaaaaagaaaagccactggactagcaaagtccatgagagtgtcattggcaggaacccggagggccagctgggctttgaactgaaggggggcgccgagaatggacagttcccctacctgggggaggtgaagcccggcaaggtggcctatgagagcggcagcaaattggtgtcggaggagctgctgctggaggtgaacgagacccccgtggcggggctcaccatcagggacgtgctggccgtgatcaaacactgcaaggaccccctccggctcaagtgtgtcaagcaaggaggaattgttgataaagaccttcgtcactacctcaacttacgatttcaaaagggttctgtggaccatgagcttcagcaaatcattcgtgacaacctctacctccgcacggtgccatgcaccacaaggccacataaggagggtgaggtccctggagtggattatattttcatcactgttgaagattttatggaattggagaaaagtggtgctctcctagaaagtgggacttatgaagacaattactacggtaccccaaagccgccagcagaaccagcaccattattgttaaatgtaacagaccagatacttccaggagccactccaagtgctgaaggaaaacggaagaggaataaatcagtgagcaacatggagaaagccagtatagagcctcctgaggaggaagaggaagagaggcctgtggtcaatggaaatggagtagtagtaacaccagaatccagtgaacatgaagacaaaagtgcaggtgcctcaggggagatgccctcccagccttatcctgcaccagtgtacagtcagcctgaggagctgaaggagcagatggatgacacaaagccaactaaacctgaagacaatgaggaaccagacccattgcctgataactgggaaatggcctatacagagaagggcgaagtctacttcattgaccataacacaaagacaacatcatggctggatccacgacttgcgaaaaaggctaaacctccagaagagtgcaaagaaaatgagcttccatatggctgggaaaaaatcgatgatcccatttatggcacttattatgttgaccacataaatagaagaacacagtttgaaaatcctgtcctggaagcaaaaaggaagctacagcaacataacatgccccacacagaacttggaacaaagcccctgcaggccccaggtttccgagaaaaaccactcttcacccgggatgcatcccagttgaagggaacattcctcagcaccaccctaaaaaagagcaacatgggctttggatttaccatcattggtggagacgagcctgatgagtttctgcaggtgaaaagtgtgattccggatgggcctgcagcacaggatggaaaaatggaaacaggtgatgtcattgtctatattaatgaagtttgtgtccttggacacactcatgcagatgttgtcaaacttttccagtctgttcctattggtcagagtgtcaacctggtgttgtgtcgtggctaccctttgccctttgatcctgaagaccctgctaacagcatggtgccaccccttgcaataatggagaggccacctccagtgatggtcaatggaagacacaactatgaaacatatttggagtacatttctcggacctcacagtcagttccagatataacagatcggccgcctcattctctgcactccatgccaactgatggtcagctagacggcacgtatccaccgcccgtccatgatgacaatgtgtctatggcttcatctggggccacccaagctgaacttatgaccttaaccattgtgaaaggtgcccagggcttcggcttcactattgccgacagtcctacaggacagcgggtgaaacaaatacttgacattcagggatgccctggcctgtgtgaaggcgacctcattgttgagatcaaccagcagaatgtacagaacctgagccatacagaagtagtggatatacttaaggactgtcccattggaagtgaaacttctttgattatccatcgaggaggtttcttttctccatggaaaactccaaagcctataatggaccgatgggagaatcaaggcagtcctcaaacgagtttatctgctccggccataccgcagaacctgcccttcccacctgcccttcacaggagctcctttcctgactcaacagaggcctttgacccacggaagcctgatccatatgagctctacgagaaatctagggccatttatgaaagtaggcgtccagattataaggaattggatgttcatcttcggaggatggagtctggatttggcttcagaatcctcgggggagatgagcctggacagcctattttgattggagctgtcattgccatgggctcagccgacagagatggccgccttcacccaggagatgagcttgtgtatgttgatgggattccagtagccggcaaaacccaccgctatgtcatcgacctcatgcaccacgcagcccgcaatgggcaggtcaacctcactgtgagaagaaaggtgctatgtggaggggagccctgcccagagaacgggagaagtccaggctctgtatccacccaccacagctctccacgcagtgactacgcaacctacaccaacagcaaccacgctgcccccagtagcaatgcctctccccctgaaggcttcgcctcccacagcctgcagaccagtgatgtggtcattcaccgcaaagagaatgagggcttcggctttgtcatcatcagctccctgaacaggcctgagtctggatccactataactgtgccccataaaatcggacgcatcattgatgggagtcctgcagatcgctgtgcaaaactaaaagtgggagaccggatcctagcagtgaatggccagtctatcatcaacatgcctcacgctgacatcgtgaagctcatcaaggatgcaggtcttagtgtcacccttcgcatcattcctcaggaggagctcaacagccccacctcggcacccagctcagagaagcagagtcccatggcgcagcagagtcccctggcacagcagagtcccctggcccagccaagcccagccacccccaacagccccatcgcccagccagcaccacctcaaccacttcagctgcaaggacacgaaaatagttacaggtcggaagtgaaagcaaggcaagatgtgaaaccagacatccgacagcctccattcacagactacaggcagcccccgctggattacaggcaacccccaggaggggactaccagcagcccccacccttggactacaggcagcctcccctactggactacaggcagcactcccccgacaccaggcagtaccctctgtcggactacagacaaccccaggattttgattatttcactgtggacatggagaaaggagccaaaggatttggattcagcattcgtggaggaagggaatacaaaatggatttgtatgtgttgagactggcagaagatggaccagcaataaggaatgggaggatgagggtaggagatcaaatcattgaaatcaatggggaaagcacaagggacatgacacatgccagagcaatagaactcatcaaatctggaggaagacgagtgaggctgctgctcaagagaggcacgggacaggtcccagaatatgacgaacccgccccctggagttctcccgctgccgccgccccaggtctgccggaagtaggcgtctccctggacgacggcctcgctccattctctccatcacatccagccccaccctccgacccttcccaccagataagcccaggcccaacttgggatatcaaacgggaacacgacgttaggaaaccaaaggagctttcagcctgcggccagaagaagcagcgcctcggggagcagagggagcgctcggcgagtccgcagagggccgcgcggccgaggctcgaggaggcgcccggcggccaggggcggcccgaggccggcaggcccgcctcggaggccagggcgcccgggctcgcggcggcagacgcggcggacgcggcgcgggcgggcgggaaggaggcgccccgtgcggcggcgggctccgagctctgccggcgcgaaggcccgggggctgcgccggcgtttgccggcccgggcggcggcggcagcggcgcgctggaggccgagggcagggcgggtgcgcgcgcgggtccccggccgggcccgcgacccccggggggcgccccggcgcgcaaggccgccgtcgcgccggggccctggaaggtgccgggttctgacaagctgcccagcgtcctcaaacccggcgcctcggccgccagcagatga

SEQ ID NO: 2022 - protein, 1441 aa, Homo sapiens
MSKSLKKKSHWTSKVHESVIGRNPEGQLGFELKGGAENGQFPYLGEVKPGKVAYESGSKLVSEELLLEVNETPVAGLTIRDVLAVIKHCKDPLRLKCVKQGGIVDKDLRHYLNLRFQKGSVDHELQQIIRDNLYLRTVPCTTRPHKEGEVPGVDYIFITVEDFMELEKSGALLESGTYEDNYYGTPKPPAEPAPLLLNVTDQILPGATPSAEGKRKRNKSVSNMEKASIEPPEEEEEERPVVNGNGVVVTPESSEHEDKSAGASGEMPSQPYPAPVYSQPEELKEQMDDTKPTKPEDNEEPDPLPDNWEMAYTEKGEVYFIDHNTKTTSWLDPRLAKKAKPPEECKENELPYGWEKIDDPIYGTYYVDHINRRTQFENPVLEAKRKLQQHNMPHTELGTKPLQAPGFREKPLFTRDASQLKGTFLSTTLKKSNMGFGFTIIGGDEPDEFLQVKSVIPDGPAAQDGKMETGDVIVYINEVCVLGHTHADVVKLFQSVPIGQSVNLVLCRGYPLPFDPEDPANSMVPPLAIMERPPPVMVNGRHNYETYLEYISRTSQSVPDITDRPPHSLHSMPTDGQLDGTYPPPVHDDNVSMASSGATQAELMTLTIVKGAQGFGFTIADSPTGQRVKQILDIQGCPGLCEGDLIVEINQQNVQNLSHTEVVDILKDCPIGSETSLIIHRGGFFSPWKTPKPIMDRWENQGSPQTSLSAPAIPQNLPFPPALHRSSFPDSTEAFDPRKPDPYELYEKSRAIYESRRPDYKELDVHLRRMESGFGFRILGGDEPGQPILIGAVIAMGSADRDGRLHPGDELVYVDGIPVAGKTHRYVIDLMHHAARNGQVNLTVRRKVLCGGEPCPENGRSPGSVSTHHSSPRSDYATYTNSNHAAPSSNASPPEGFASHSLQTSDVVIHRKENEGFGFVIISSLNRPESGSTITVPHKIGRIIDGSPADRCAKLKVGDRILAVNGQSIINMPHADIVKLIKDAGLSVTLRIIPQEELNSPTSAPSSEKQSPMAQQSPLAQQSPLAQPSPATPNSPIAQPAPPQPLQLQGHENSYRSEVKARQDVKPDIRQPPFTDYRQPPLDYRQPPGGDYQQPPPLDYRQPPLLDYRQHSPDTRQYPLSDYRQPQDFDYFTVDMEKGAKGFGFSIRGGREYKMDLYVLRLAEDGPAIRNGRMRVGDQIIEINGESTRDMTHARAIELIKSGGRRVRLLLKRGTGQVPEYDEPAPWSSPAAAAPGLPEVGVSLDDGLAPFSPSHPAPPSDPSHQISPGPTWDIKREHDVRKPKELSACGQKKQRLGEQRERSASPQRAARPRLEEAPGGQGRPEAGRPASEARAPGLAAADAADAARAGGKEAPRAAAGSELCRREGPGAAPAFAGPGGGGSGALEAEGRAGARAGPRPGPRPPGGAPARKAAVAPGPWKVPGSDKLPSVLKPGASAASR

SEQ ID NO: 2023 - DNA, 2409 bp, Homo sapiens
agcacatgctgggctcgggggcgatgggcttgtgcgcggacctggcgacgctctagccccgagccgcgtattcgtggccgggtcctccctgggaacagggtgaaggccgagaacctctggcctcaggaagcgcatgcgcaaccggttctccgaaacatggagtcctgtaggcaaggtcttacctgaatcaggatgagggagtggtgggtccaggtggggctgctggccgtgcccctgcttgctgcgtacctgcacatcccaccccctcagctctcccctgcccttcactcatggaagtcttcaggcaagtttttcacttacaagggactgcgtatcttctaccaagactctgtgggtgtggttggaagtccagagatagttgtgcttttacacggttttccaacatccagctacgactggtacaagatttgggaaggtctgaccttgaggtttcatcgggtgattgcccttgatttcttaggctttggcttcagtgacaaaccgagaccacatcactattccatatttgagcaggccagcatcgtggaagcgcttttgcggcatctggggctccagaaccgcaggatcaaccttctttctcatgactatggagatattgttgctcaggagcttctctacaggtacaagcagaatcgatctggtcggcttaccataaagagtctctgtctgtcaaatggaggtatctttcctgagactcaccgtccactccttctccaaaagctactcaaagatggaggtgtgctgtcacccatcctcacacgactgatgaacttctttgtattctctcgaggtctcaccccagtctttgggccgtatactcggccctctgagagtgagctgtgggacatgtgggcagggatccgcaacaatgacgggaacttagtcattgacagtctcttacagtacatcaatcagaggaagaagttcagaaggcgctgggtgggagctcttgcctctgtaactatccccattcattttatctatgggccattggatcctgtaaatccctatccagagtttttggagctgtacaggaaaacgctgccgcggtccacagtgtcgattctggatgaccacattagccactatccacagctagaggatcccatgggcttcttgaatgcatatatgggcttcatcaactccttctgagctggaaagagtagcttccctgtattacctcccctactcccttatgtgttgtgtattccacttaggaagaaatgcccaaaagaggtcctggccatcaaacataattctctcacaaagtccactttactcaaattggtgaacagtgtataggaagaagccagcaggagctctgactaaggttgacataatagtccacctcccattactttgatatctgatcaaatgtatagacttggctttgttttttgtgctattaggaaattctgatgagcattactattcactgatgcagaaagacgttcttttgcataaaagacttttttttaacactttggacttctctgaaatatttagaagtgctaatttctggcccacccccaacaggaattctatagtaaggaggaggagaaggggggctccttccctctcctcgaatgacgttatgggcacatgccttttaaaagttctttaagcaacacagagctgagtcctctttgtcatacctttggatttagtgtttcatcagctgtttttagttataaacattttgttaaaatagatattggtttaaatgatacagtattttaggtatgatttaagactatgatttacctatacattatatatattttataaagatactaaaccagcatacccttactctgccagagtagtgaagctaattaaacacatttggtttctgaataaattgaactaaatccaaactatttcctaaaatcacaggacattaaggaccaatagcatctgtgccagagatgtactgttattagctgggaagaccaattctaacagcaaataacagtctgagactcctcatacctcagtggttagaagcatgtctctcttgagctacagtagaggggaagggattgttgtgtagtcaagtcaccatgctgaatgtacactgattcctttatgatgactgcttaactccccactgcctgtcccagagaggctttccaatgtagctcagtaattcctgttactttacagacaggaaagttccagaaactttaagaacaaactctgaaagacctatgagcaaatggtgctgaatactttttttttaaagccacatttcattgtcttagtcaaagcaggattattaagtgattatttaaaattcgtttttttaaattagcaacttcaagtataacaactttgaaactggaataagtgtttattttctattaataaaaatgaattgtgacaaaa

SEQ ID NO: 2024 - protein, 326 aa, Homo sapiens
MREWWVQVGLLAVPLLAAYLHIPPPQLSPALHSWKSSGKFFTYKGLRIFYQDSVGVVGSPEIVVLLHGFPTSSYDWYKIWEGLTLRFHRVIALDFLGFGFSDKPRPHHYSIFEQASIVEALLRHLGLQNRRINLLSHDYGDIVAQELLYRYKQNRSGRLTIKSLCLSNGGIFPETHRPLLLQKLLKDGGVLSPILTRLMNFFVFSRGLTPVFGPYTRPSESELWDMWAGIRNNDGNLVIDSLLQYINQRKKFRRRWVGALASVTIPIHFIYGPLDPVNPYPEFLELYRKTLPRSTVSILDDHISHYPQLEDPMGFLNAYMGFINSF

SEQ ID NO: 2025 - DNA, 2464 bp, Homo sapiens
cggcaaccagcacaccccggcacctcctctgcggcagctgcgcctcgcaagcgcagtgccgcagcgcacgccggagtggctgtagctgcccggcgcggcgccgccctgcgcgggctgtgggctgcgggctgcgcccccgctgctggccagctctgcacggctgcgggctctgcggcgcccggtgctctgcaacgctgcggcgggcggcatgggataacgcggccatggtgcgccgagatcgcctccgcaggatgagggagtggtgggtccaggtggggctgctggccgtgcccctgcttgctgcgtacctgcacatcccaccccctcagctctcccctgcccttcactcatggaagtcttcaggcaagtttttcacttacaagggactgcgtatcttctaccaagactctgtgggtgtggttggaagtccagagatagttgtgcttttacacggttttccaacatccagctacgactggtacaagatttgggaaggtctgaccttgaggtttcatcgggtgattgcccttgatttcttaggctttggcttcagtgacaaaccgagaccacatcactattccatatttgagcaggccagcatcgtggaagcgcttttgcggcatctggggctccagaaccgcaggatcaaccttctttctcatgactatggagatattgttgctcaggagcttctctacaggtacaagcagaatcgatctggtcggcttaccataaagagtctctgtctgtcaaatggaggtatctttcctgagactcaccgtccactccttctccaaaagctactcaaagatggaggtgtgctgtcacccatcctcacacgactgatgaacttctttgtattctctcgaggtctcaccccagtctttgggccgtatactcggccctctgagagtgagctgtgggacatgtgggcagggatccgcaacaatgacgggaacttagtcattgacagtctcttacagtacatcaatcagaggaagaagttcagaaggcgctgggtgggagctcttgcctctgtaactatccccattcattttatctatgggccattggatcctgtaaatccctatccagagtttttggagctgtacaggaaaacgctgccgcggtccacagtgtcgattctggatgaccacattagccactatccacagctagaggatcccatgggcttcttgaatgcatatatgggcttcatcaactccttctgagctggaaagagtagcttccctgtattacctcccctactcccttatgtgttgtgtattccacttaggaagaaatgcccaaaagaggtcctggccatcaaacataattctctcacaaagtccactttactcaaattggtgaacagtgtataggaagaagccagcaggagctctgactaaggttgacataatagtccacctcccattactttgatatctgatcaaatgtatagacttggctttgttttttgtgctattaggaaattctgatgagcattactattcactgatgcagaaagacgttcttttgcataaaagacttttttttaacactttggacttctctgaaatatttagaagtgctaatttctggcccacccccaacaggaattctatagtaaggaggaggagaaggggggctccttccctctcctcgaatgacgttatgggcacatgccttttaaaagttctttaagcaacacagagctgagtcctctttgtcatacctttggatttagtgtttcatcagctgtttttagttataaacattttgttaaaatagatattggtttaaatgatacagtattttaggtatgatttaagactatgatttacctatacattatatatattttataaagatactaaaccagcatacccttactctgccagagtagtgaagctaattaaacacatttggtttctgaataaattgaactaaatccaaactatttcctaaaatcacaggacattaaggaccaatagcatctgtgccagagatgtactgttattagctgggaagaccaattctaacagcaaataacagtctgagactcctcatacctcagtggttagaagcatgtctctcttgagctacagtagaggggaagggattgttgtgtagtcaagtcaccatgctgaatgtacactgattcctttatgatgactgcttaactccccactgcctgtcccagagaggctttccaatgtagctcagtaattcctgttactttacagacaggaaagttccagaaactttaagaacaaactctgaaagacctatgagcaaatggtgctgaatactttttttttaaagccacatttcattgtcttagtcaaagcaggattattaagtgattatttaaaattcgtttttttaaattagcaacttcaagtataacaactttgaaactggaataagtgtttattttctattaataaaaatgaattgtgac

SEQ ID NO: 2026 - protein, 335 aa, Homo sapiens
MVRRDRLRRMREWWVQVGLLAVPLLAAYLHIPPPQLSPALHSWKSSGKFFTYKGLRIFYQDSVGVVGSPEIVVLLHGFPTSSYDWYKIWEGLTLRFHRVIALDFLGFGFSDKPRPHHYSIFEQASIVEALLRHLGLQNRRINLLSHDYGDIVAQELLYRYKQNRSGRLTIKSLCLSNGGIFPETHRPLLLQKLLKDGGVLSPILTRLMNFFVFSRGLTPVFGPYTRPSESELWDMWAGIRNNDGNLVIDSLLQYINQRKKFRRRWVGALASVTIPIHFIYGPLDPVNPYPEFLELYRKTLPRSTVSILDDHISHYPQLEDPMGFLNAYMGFINSF

SEQ ID NO: 2027 - DNA, 5814 bp, Homo sapiens
ctggctctgcgccccagcccggctctgctgcagcggcagggaggaagagccgccgcagcgcgactcgggagccccgggccacagcctggcctccggagccacccacaggcctccccgggcggcgcccacgctcctaccgcccggacgcgcggatcctccgccggcaccgcagccacctgctcccggcccagaggcgacgacacgatgcgctgcgcgctggcgctctcggcgctgctgctactgttgtcaacgccgccgctgctgccgtcgtcgccgtcgccgtcgccgtcgccctcccagaatgcaacccagactactacggactcatctaacaaaacagcaccgactccagcatccagtgtcaccatcatggctacagatacagcccagcagagcacagtccccacttccaaggccaacgaaatcttggcctcggtcaaggcgaccacccttggtgtatccagtgactcaccggggactacaaccctggctcagcaagtctcaggcccagtcaacactaccgtggctagaggaggcggctcaggcaaccctactaccaccatcgagagccccaagagcacaaaaagtgcagacaccactacagttgcaacctccacagccacagctaaacctaacaccacaagcagccagaatggagcagaagatacaacaaactctggggggaaaagcagccacagtgtgaccacagacctcacatccactaaggcagaacatctgacgacccctcaccctacaagtccacttagcccccgacaacccacttcgacgcatcctgtggccaccccaacaagctcgggacatgaccatcttatgaaaatttcaagcagttcaagcactgtggctatccctggctacaccttcacaagcccggggatgaccaccaccctaccgtcatcggttatctcgcaaagaactcaacagacctccagtcagatgccagccagctctacggccccttcctcccaggagacagtgcagcccacgagcccggcaacggcattgagaacacctaccctgccagagaccatgagctccagccccacagcagcatcaactacccaccgataccccaaaacaccttctcccactgtggctcatgagagtaactgggtaactccagcaggggtggcaagtaggagaacccagactcgggtagaagaggctttaagacaagggggcgcttcggatgagaaattgatctcactgatatgccgagcagtcaaagccaccttcaacccggcccaagataagtgcggcatacggctggcatctgttccaggaagtcagaccgtggtcgtcaaagaaatcactattcacactaagctccctgccaaggatgtgtacgagcggctgaaggacaaatgggatgaactaaaggaggcaggggtcagtgacatgaagctaggggaccaggggccaccggaggaggccgaggaccgcttcagcatgcccctcatcatcaccatcgtctgcatggcatcattcctgctcctcgtggcggccctctatggctgctgccaccagcgcctctcccagaggaaggaccagcagcggctaacagaggagctgcagacagtggagaatggttaccatgacaacccaacactggaagtgatggagacctcttctgagatgcaggagaagaaggtggtcagcctcaacggggagctgggggacagctggatcgtccctctggacaacctgaccaaggacgacctggatgaggaggaagacacacacctctagtccggtctgccggtggcctccagcagcaccacagagctccagaccaaccaccccaagtgccgtttggatggggaagggaaagactggggagggagagtgaactccgaggggtgtcccctcccaatccccccagggccttaatttttcccttttcaacctgaacaaatcacattctgtccagattcctcttgtaaaataacccactagtgcctgagctcagtgctgctggatgatgagggagatcaagaaaaagccacgtaagggactttatagatgaactagtggaatcccttcattctgcagtgagattgccgagacctgaagagggtaagtgacttgcccaaggtcagagccacttggtgacagagccaggatgagaacaaagattccatttgcaccatgccacactgctgtgttcacatgtgccttccgtccagagcagtcccgggcaggggtgaaactccagcaggtggctgggctggaaaggagggcagggctacatcctggctcggtgggatctgacgacctgaaagtccagctcccaagttttccttctcctaccccagcctcgtgtacccatcttcccaccctctatgttcttacccctccctacactcagtgtttgttcccacttactctgtcctggggcctctgggattagcacaggttattcataaccttgaaccccttgttctggattcggattttctcacatttgcttcgtgagatgggggcttaacccacacaggtctccgtgcgtgaaccaggtctgcttaggggacctgcgtgcaggtgaggagagaaggggacactcgagtccaggctggtatctcagggcagctgatgaggggtcagcaggaacactggcccattgcccctggcactccttgcagaggccacccacgatcttctttgggcttccatttccaccagggactaaaatctgctgtagctagtgagagcagcgtgttccttttgttgttcactgctcagctgatgggagtgattccctgagacccagtatgaaagagcagtggctgcaggagaggccttcccggggccccccatcagcgatgtgtcttcagagacaatccattaaagcagccaggaaggacaggctttcccctgtatatcataggaaactcagggacatttcaagttgctgagagttttgttatagttgttttctaacccagccctccactgccaaaggccaaaagctcagacagttggcagacgtccagttagctcatctcactcactctgattctcctgtgccacaggaaaagagggcctggaaagcgcagtgcatgctgggtgcatgaagggcagcctgggggacagactgttgtgggaacgtcccactgtcctggcctggagctaggccttgctgttcctcttctctgtgagcctagtggggctgctgcggttctcttgcagtttctggtggcatctcaggggaacacaaagctatgtctattccccaatataggacttttatgggctcggcagttagctgccatgtagaaggctcctaagcagtgggcatggtgaggtttcatctgattgagaagggggaatcctgtgtggaatgttgaactttcgccatggtctccatcgttctgggcgtaaattccctgggatcaagtaggaaaatgggcagaactgcttaggggaatgaaattgccatttttcgggtgaaacgccacacctccagggtcttaagagtcaggctccggctgtagtagctctgatgaaataggctatccactcgggatggcttactttttaaaagggtagggggaggggctggggaagatctgtcctgcaccatctgcctaattccttcctcacagtctgtagccatctgatatcctaggggaaaaggaaggccaggggttcacatagggccccagcgagtttcccaggagttagagggatgcgaggctaacaagttccaaaaacatctgccccgatgctctagtgtttggaggtgggcaggatggagaacagtgcctgtttgggggaaaacaggaaatcttgttaggcttgagtgaggtgtttgcttccttcttgcccagcgctgggttctctccacccagtaggttttctgttgtggtcccgtgggagaggccagactggattattcctcctttgctgatcctgggtcacacttcaccagccagggcttttgacggagacagcaaataggcctctgcaaatcaatcaaaggctgcaaccctatggcctcttggagacagatgatgactggcaaggactagagagcaggagtgcctggccaggtcggtcctgactctcctgactctccatcgctctgtccaaggagaacccggagaggctctgggctgattcagaggttactgctttatattcgtccaaactgtgttagtctaggcttaggacagcttcagaatctgacaccttgccttgctcttgccaccaggacacctatgtcaacaggccaaacagccatgcatctataaaggtcatcatcttctgccacctttactgggttctaaatgctctctgataattcagagagcattgggtctgggaagaggtaagaggaacactagaagctcagcatgacttaaacaggttgtagcaaagacagtttatcatcagctctttcagtggtaaactgtggtttccccaagctgcacaggaggccagaaaccacaagtatgatgactaggaagcctactgtcatgagagtggggagacaggcagcaaagcttatgaaggaggtacagaatattctttgcgttgtaagacagaatacgggtttaatctagtctaggcaccagatttttttcccgcttgataaggaaagctagcagaaagtttatttaaaccacttcttgagctttatcttttttgacaatatactggagaaactttgaagaacaagttcaaactgatacatatacacatatttttttgataatgtaaatacagtgaccatgttaacctaccctgcactgctttaagtgaacatactttgaaaaagcattatgttagctgagtgatggccaagttttttctctggacaggaatgtaaatgtcttactggaaatgacaagtttttgcttgatttttttttttaaacaaaaaatgaaatataacaagacaaacttatgataaagtatttgtcttgtagatcaggtgttttgttttgtttttttaattttaaaatgcaaccctgccccctccccagcaaagtcacagctccatttcagtaaaggttggagtcaatatgctctggttggcaggcaaccctgtagtcatggagaaaggtatttcaagatctagtccaatctttttctagagaaaaagataatctgaagctcacaaagatgaagtgacttcctcaaaatcacatggttcaggacagaaacaagattaaaacctggatccacagactgtgcgcctcagaaggaataatcggtaaattaagaattgctactcgaaggtgccagaatgacacaaaggacagaattcctttcccagttgttaccctagcaaggctagggagggcatgaacacaaacataagaactggtcttctacactttctctgaatcatttaggtttaagatgtaagtgaacaattctttctttctgccaagaaacaaagttttggatgagcttttatatatggaacttactccaacaggactgagggaccaaggaaacatgatgggggaggcagagagggcaagagtaaaactgtagcatagcttttgtcacggtcactagctgatccctcaggtctgctgcaaacacagcatggaggacacagatgactctttggtgttggtctttttgtctgcagtgaatgttcaacagtttgcccaggaactgggggatcatatatgtcttagtggacaggggtctgaagtacactggaatttactgagaaacttgtttgtaaaaactatagttaataattattgcattttcttacaaaaatatattttggaaaattgtatactgtcaattaaagtgtttttgtgtaaactggttc

SEQ ID NO: 2028 - protein, 520 aa, Homo sapiens
MRCALALSALLLLLSTPPLLPSSPSPSPSPSQNATQTTTDSSNKTAPTPASSVTIMATDTAQQSTVPTSKANEILASVKATTLGVSSDSPGTTTLAQQVSGPVNTTVARGGGSGNPTTTIESPKSTKSADTTTVATSTATAKPNTTSSQNGAEDTTNSGGKSSHSVTTDLTSTKAEHLTTPHPTSPLSPRQPTSTHPVATPTSSGHDHLMKISSSSSTVAIPGYTFTSPGMTTTLPSSVISQRTQQTSSQMPASSTAPSSQETVQPTSPATALRTPTLPETMSSSPTAASTTHRYPKTPSPTVAHESNWVTPAGVASRRTQTRVEEALRQGGASDEKLISLICRAVKATFNPAQDKCGIRLASVPGSQTVVVKEITIHTKLPAKDVYERLKDKWDELKEAGVSDMKLGDQGPPEEAEDRFSMPLIITIVCMASFLLLVAALYGCCHQRLSQRKDQQRLTEELQTVENGYHDNPTLEVMETSSEMQEKKVVSLNGELGDSWIVPLDNLTKDDLDEEEDTHL

SEQ ID NO: 2029 - DNA, 2654 bp, Homo sapiens
atggccctgtccactgagcatcctcccgccacacagaaacccgcccagccggggccaccgaccccaccccctgcctggaaacttaaaggaggccggagctgtggggagctcagagctgagatcctacaggagtccagggctggagagaaaacctctgcgaggaaagggaaggagcaagccgtgaatttaagggacgctgtgaagcaatcatggatgcaatgaagagagggctctgctgtgtgctgctgctgtgtggagcagtcttcgtttcgcccagccaggaaatccatgcccgattcagaagaggagccagatcttaccaagtgatctgcagagatgaaaaaacgcagatgatataccagcaacatcagtcatggctgcgccctgtgctcagaagcaaccgggtggaatattgctggtgcaacagtggcagggcacagtgccactcagtgcctgtcaaaagttgcagcgagccaaggtgtttcaacgggggcacctgccagcaggccctgtacttctcagatttcgtgtgccagtgccccgaaggatttgctgggaagtgctgtgaaatagataccagggccacgtgctacgaggaccagggcatcagctacaggggcacgtggagcacagcggagagtggcgccgagtgcaccaactggaacagcagcgcgttggcccagaagccctacagcgggcggaggccagacgccatcaggctgggcctggggaaccacaactactgcagaaacccagatcgagactcaaagccctggtgctacgtctttaaggcggggaagtacagctcagagttctgcagcacccctgcctgctctgagggaaacagtgactgctactttgggaatgggtcagcctaccgtggcacgcacagcctcaccgagtcgggtgcctcctgcctcccgtggaattccatgatcctgataggcaaggtttacacagcacagaaccccagtgcccaggcactgggcctgggcaaacataattactgccggaatcctgatggggatgccaagccctggtgccacgtgctgaagaaccgcaggctgacgtgggagtactgtgatgtgccctcctgctccacctgcggcctgagacagtacagccagcctcagtttcgcatcaaaggagggctcttcgccgacatcgcctcccacccctggcaggctgccatctttgccaagcacaggaggtcgcccggagagcggttcctgtgcgggggcatactcatcagctcctgctggattctctctgccgcccactgcttccaggagaggtttccgccccaccacctgacggtgatcttgggcagaacataccgggtggtccctggcgaggaggagcagaaatttgaagtcgaaaaatacattgtccataaggaattcgatgatgacacttacgacaatgacattgcgctgctgcagctgaaatcggattcgtcccgctgtgcccaggagagcagcgtggtccgcactgtgtgccttcccccggcggacctgcagctgccggactggacggagtgtgagctctccggctacggcaagcatgaggccttgtctcctttctattcggagcggctgaaggaggctcatgtcagactgtacccatccagccgctgcacatcacaacatttacttaacagaacagtcaccgacaacatgctgtgtgctggagacactcggagcggcgggccccaggcaaacttgcacgacgcctgccagggcgattcgggaggccccctggtgtgtctgaacgatggccgcatgactttggtgggcatcatcagctggggcctgggctgtggacagaaggatgtcccgggtgtgtacaccaaggttaccaactacctagactggattcgtgacaacatgcgaccgtgaccaggaacacccgactcctcaaaagcaaatgagatcccgcctcttcttcttcagaagacactgcaaaggcgcagtgcttctctacagacttctccagacccaccacaccgcagaagcgggacgagaccctacaggagagggaagagtgcattttcccagatacttcccattttggaagttttcaggacttggtctgatttcaggatactctgtcagatgggaagacatgaatgcacactagcctctccaggaatgcctcctccctgggcagaaagtggccatgccaccctgttttcagctaaagcccaacctcctgacctgtcaccgtgagcagctttggaaacaggaccacaaaaatgaaagcatgtctcaatagtaaaagataacaagatctttcaggaaagacggattgcattagaaatagacagtatatttatagtcacaagagcccagcagggcctcaaagttggggcaggctggctggcccgtcatgttcctcaaaagcacccttgacgtcaagtctccttcccctttccccactccctggctctcagaaggtattccttttgtgtacagtgtgtaaagtgtaaatcctttttctttataaactttagagtagcatgagagaattgtatcatttgaacaactaggcttcagcatatttatagcaatccatgttagtttttactttctgttgccacaaccctgttttatactgtacttaataaattcagatatatttttcacagtttttcc

SEQ ID NO: 2030 - protein, 562 aa, Homo sapiens
MDAMKRGLCCVLLLCGAVFVSPSQEIHARFRRGARSYQVICRDEKTQMIYQQHQSWLRPVLRSNRVEYCWCNSGRAQCHSVPVKSCSEPRCFNGGTCQQALYFSDFVCQCPEGFAGKCCEIDTRATCYEDQGISYRGTWSTAESGAECTNWNSSALAQKPYSGRRPDAIRLGLGNHNYCRNPDRDSKPWCYVFKAGKYSSEFCSTPACSEGNSDCYFGNGSAYRGTHSLTESGASCLPWNSMILIGKVYTAQNPSAQALGLGKHNYCRNPDGDAKPWCHVLKNRRLTWEYCDVPSCSTCGLRQYSQPQFRIKGGLFADIASHPWQAAIFAKHRRSPGERFLCGGILISSCWILSAAHCFQERFPPHHLTVILGRTYRVVPGEEEQKFEVEKYIVHKEFDDDTYDNDIALLQLKSDSSRCAQESSVVRTVCLPPADLQLPDWTECELSGYGKHEALSPFYSERLKEAHVRLYPSSRCTSQHLLNRTVTDNMLCAGDTRSGGPQANLHDACQGDSGGPLVCLNDGRMTLVGIISWGLGCGQKDVPGVYTKVTNYLDWIRDNMRP

SEQ ID NO: 2031 - DNA, 1947 bp, Homo sapiens
atagtgatctgcagagatgaaaaaacgcagatgatataccagcaacatcagtcatggctgcgccctgtgctcagaagcaaccgggtggaatattgctggtgcaacagtggcagggcacagtgccactcagaaagaaacagtgactgctactttgggaatgggtcagcctaccgtggcacgcacagcctcaccgagtcgggtgcctcctgcctcccgtggaattccatgatcctgataggcaaggtttacacagcacagaaccccagtgcccaggcactgggcctgggcaaacataattactgccggaatcctgatggggatgccaagccctggtgccacgtgctgaagaaccgcaggctgacgtgggagtactgtgatgtgccctcctgctccacctgcggcctgagacagtacagccagcctcagtttcgcatcaaaggagggctcttcgccgacatcgcctcccacccctggcaggctgccatctttgccaagcacaggaggtcgcccggagagcggttcctgtgcgggggcatactcatcagctcctgctggattctctctgccgcccactgcttccaggagaggtttccgccccaccacctgacggtgatcttgggcagaacataccgggtggtccctggcgaggaggagcagaaatttgaagtcgaaaaatacattgtccataaggaattcgatgatgacacttacgacaatgacattgcgctgctgcagctgaaatcggattcgtcccgctgtgcccaggagagcagcgtggtccgcactgtgtgccttcccccggcggacctgcagctgccggactggacggagtgtgagctctccggctacggcaagcatgaggccttgtctcctttctattcggagcggctgaaggaggctcatgtcagactgtacccatccagccgctgcacatcacaacatttacttaacagaacagtcaccgacaacatgctgtgtgctggagacactcggagcggcgggccccaggcaaacttgcacgacgcctgccagggcgattcgggaggccccctggtgtgtctgaacgatggccgcatgactttggtgggcatcatcagctggggcctgggctgtggacagaaggatgtcccgggtgtgtacaccaaggttaccaactacctagactggattcgtgacaacatgcgaccgtgaccaggaacacccgactcctcaaaagcaaatgagatcccgcctcttcttcttcagaagacactgcaaaggcgcagtgcttctctacagacttctccagacccaccacaccgcagaagcgggacgagaccctacaggagagggaagagtgcattttcccagatacttcccattttggaagttttcaggacttggtctgatttcaggatactctgtcagatgggaagacatgaatgcacactagcctctccaggaatgcctcctccctgggcagaaagtggccatgccaccctgttttcagctaaagcccaacctcctgacctgtcaccgtgagcagctttggaaacaggaccacaaaaatgaaagcatgtctcaatagtaaaagataacaagatctttcaggaaagacggattgcattagaaatagacagtatatttatagtcacaagagcccagcagggcctcaaagttggggcaggctggctggcccgtcatgttcctcaaaagcacccttgacgtcaagtctccttcccctttccccactccctggctctcagaaggtattccttttgtgtacagtgtgtaaagtgtaaatcctttttctttataaactttagagtagcatgagagaattgtatcatttgaacaactaggcttcagcatatttatagcaatccatgttagtttttactttctgttgccacaaccctgttttatactgtacttaataaattcagatatatttttcacagtttttcc

SEQ ID NO: 2032 - protein, 396 aa, Homo sapiens
IVICRDEKTQMIYQQHQSWLRPVLRSNRVEYCWCNSGRAQCHSERNSDCYFGNGSAYRGTHSLTESGASCLPWNSMILIGKVYTAQNPSAQALGLGKHNYCRNPDGDAKPWCHVLKNRRLTWEYCDVPSCSTCGLRQYSQPQFRIKGGLFADIASHPWQAAIFAKHRRSPGERFLCGGILISSCWILSAAHCFQERFPPHHLTVILGRTYRVVPGEEEQKFEVEKYIVHKEFDDDTYDNDIALLQLKSDSSRCAQESSVVRTVCLPPADLQLPDWTECELSGYGKHEALSPFYSERLKEAHVRLYPSSRCTSQHLLNRTVTDNMLCAGDTRSGGPQANLHDACQGDSGGPLVCLNDGRMTLVGIISWGLGCGQKDVPGVYTKVTNYLDWIRDNMRP

SEQ ID NO: 2033 - DNA, 2516 bp, Homo sapiens
atggccctgtccactgagcatcctcccgccacacagaaacccgcccagccggggccaccgaccccaccccctgcctggaaacttaaaggaggccggagctgtggggagctcagagctgagatcctacaggagtccagggctggagagaaaacctctgcgaggaaagggaaggagcaagccgtgaatttaagggacgctgtgaagcaatcatggatgcaatgaagagagggctctgctgtgtgctgctgctgtgtggagcagtcttcgtttcgcccagccaggaaatccatgcccgattcagaagaggagccagatcttaccaaggttgcagcgagccaaggtgtttcaacgggggcacctgccagcaggccctgtacttctcagatttcgtgtgccagtgccccgaaggatttgctgggaagtgctgtgaaatagataccagggccacgtgctacgaggaccagggcatcagctacaggggcacgtggagcacagcggagagtggcgccgagtgcaccaactggaacagcagcgcgttggcccagaagccctacagcgggcggaggccagacgccatcaggctgggcctggggaaccacaactactgcagaaacccagatcgagactcaaagccctggtgctacgtctttaaggcggggaagtacagctcagagttctgcagcacccctgcctgctctgagggaaacagtgactgctactttgggaatgggtcagcctaccgtggcacgcacagcctcaccgagtcgggtgcctcctgcctcccgtggaattccatgatcctgataggcaaggtttacacagcacagaaccccagtgcccaggcactgggcctgggcaaacataattactgccggaatcctgatggggatgccaagccctggtgccacgtgctgaagaaccgcaggctgacgtgggagtactgtgatgtgccctcctgctccacctgcggcctgagacagtacagccagcctcagtttcgcatcaaaggagggctcttcgccgacatcgcctcccacccctggcaggctgccatctttgccaagcacaggaggtcgcccggagagcggttcctgtgcgggggcatactcatcagctcctgctggattctctctgccgcccactgcttccaggagaggtttccgccccaccacctgacggtgatcttgggcagaacataccgggtggtccctggcgaggaggagcagaaatttgaagtcgaaaaatacattgtccataaggaattcgatgatgacacttacgacaatgacattgcgctgctgcagctgaaatcggattcgtcccgctgtgcccaggagagcagcgtggtccgcactgtgtgccttcccccggcggacctgcagctgccggactggacggagtgtgagctctccggctacggcaagcatgaggccttgtctcctttctattcggagcggctgaaggaggctcatgtcagactgtacccatccagccgctgcacatcacaacatttacttaacagaacagtcaccgacaacatgctgtgtgctggagacactcggagcggcgggccccaggcaaacttgcacgacgcctgccagggcgattcgggaggccccctggtgtgtctgaacgatggccgcatgactttggtgggcatcatcagctggggcctgggctgtggacagaaggatgtcccgggtgtgtacaccaaggttaccaactacctagactggattcgtgacaacatgcgaccgtgaccaggaacacccgactcctcaaaagcaaatgagatcccgcctcttcttcttcagaagacactgcaaaggcgcagtgcttctctacagacttctccagacccaccacaccgcagaagcgggacgagaccctacaggagagggaagagtgcattttcccagatacttcccattttggaagttttcaggacttggtctgatttcaggatactctgtcagatgggaagacatgaatgcacactagcctctccaggaatgcctcctccctgggcagaaagtggccatgccaccctgttttcagctaaagcccaacctcctgacctgtcaccgtgagcagctttggaaacaggaccacaaaaatgaaagcatgtctcaatagtaaaagataacaagatctttcaggaaagacggattgcattagaaatagacagtatatttatagtcacaagagcccagcagggcctcaaagttggggcaggctggctggcccgtcatgttcctcaaaagcacccttgacgtcaagtctccttcccctttccccactccctggctctcagaaggtattccttttgtgtacagtgtgtaaagtgtaaatcctttttctttataaactttagagtagcatgagagaattgtatcatttgaacaactaggcttcagcatatttatagcaatccatgttagtttttactttctgttgccacaaccctgttttatactgtacttaataaattcagatatatttttcacagtttttcc

SEQ ID NO: 2034 - protein, 543 aa, Homo sapiens
GVQGWRENLCEEREGASREFKGRCEAIMDAMKRGLCCVLLLCGAVFVSPSQEIHARFRRGARSYQGCSEPRCFNGGTCQQALYFSDFVCQCPEGFAGKCCEIDTRATCYEDQGISYRGTWSTAESGAECTNWNSSALAQKPYSGRRPDAIRLGLGNHNYCRNPDRDSKPWCYVFKAGKYSSEFCSTPACSEGNSDCYFGNGSAYRGTHSLTESGASCLPWNSMILIGKVYTAQNPSAQALGLGKHNYCRNPDGDAKPWCHVLKNRRLTWEYCDVPSCSTCGLRQYSQPQFRIKGGLFADIASHPWQAAIFAKHRRSPGERFLCGGILISSCWILSAAHCFQERFPPHHLTVILGRTYRVVPGEEEQKFEVEKYIVHKEFDDDTYDNDIALLQLKSDSSRCAQESSVVRTVCLPPADLQLPDWTECELSGYGKHEALSPFYSERLKEAHVRLYPSSRCTSQHLLNRTVTDNMLCAGDTRSGGPQANLHDACQGDSGGPLVCLNDGRMTLVGIISWGLGCGQKDVPGVYTKVTNYLDWIRDNMRP

SEQ ID NO: 2035 - DNA, 2018 bp, Homo sapiens
ggagtccagggctggagagaaaacctctgcgaggaaagggaaggagcaagccgtgaatttaagggacgctgtgaagcaatcatggatgcaatgaagagagggctctgctgtgtgctgctgctgtgtggagcagtcttcgtttcgcccagccaggaaatccatgcccgattcagaagaggagccagatcttaccaagtgatctgcagagatgaaaaaacgcagatgatataccagcaacatcagtcatggctgcgccctgtgctcagaagcaaccgggtggaatattgctggtgcaacagtggcagggcacagtgccactcagtgcctgtcaaaagttgcagcgagccaaggtgtttcaacgggggcacctgccagcaggccctgtacttctcagatttcgtgtgccagtgccccgaaggatttgctgggaagtgctgtgaaatagataccagggccacgtgctacgaggaccagggcatcagctacaggggcacgtggagcacagcggagagtggcgccgagtgcaccaactggaacagcagcgcgttggcccagaagccctacagcgggcggaggccagacgccatcaggctgggcctggggaaccacaactactgcagaaacccagatcgagactcaaagccctggtgctacgtctttaaggcggggaagtacagctcagagttctgcagcacccctgcctgctctgagggaaacagtgactgctactttgggaatgggtcagcctaccgtggcacgcacagcctcaccgagtcgggtgcctcctgcctcccgtggaattccatgatcctgataggcaaggtttacacagcacagaaccccagtgcccaggcactgggcctgggcaaacataattactgccgctgccggactggacggagtgtgagctctccggctacggcaagcatgaggccttgtctcctttctattcggagcggctgaaggaggctcatgtcagactgtacccatccagccgctgcacatcacaacatttacttaacagaacagtcaccgacaacatgctgtgtgctggagacactcggagcggcgggccccaggcaaacttgcacgacgcctgccagggcgattcgggaggccccctggtgtgtctgaacgatggccgcatgactttggtgggcatcatcagctggggcctgggctgtggacagaaggatgtcccgggtgtgtacaccaaggttaccaactacctagactggattcgtgacaacatgcgaccgtgaccaggaacacccgactcctcaaaagcaaatgagatcccgcctcttcttcttcagaagacactgcaaaggcgcagtgcttctctacagacttctccagacccaccacaccgcagaagcgggacgagaccctacaggagagggaagagtgcattttcccagatacttcccattttggaagttttcaggacttggtctgatttcaggatactctgtcagatgggaagacatgaatgcacactagcctctccaggaatgcctcctccctgggcagaaagtggccatgccaccctgttttcagctaaagcccaacctcctgacctgtcaccgtgagcagctttggaaacaggaccacaaaaatgaaagcatgtctcaatagtaaaagataacaagatctttcaggaaagacggattgcattagaaatagacagtatatttatagtcacaagagcccagcagggcctcaaagttggggcaggctggctggcccgtcatgttcctcaaaagcacccttgacgtcaagtctccttcccctttccccactccctggctctcagaaggtattccttttgtgtacagtgtgtaaagtgtaaatcctttttctttataaactttagagtagcatgagagaattgtatcatttgaacaactaggcttcagcatatttatagcaatccatgttagtttttactttctgttgccacaaccctgttttatactgtacttaataaattcagatatatttttcacagtttttcc

SEQ ID NO: 2036 - protein, 293 aa, Homo sapiens
MDAMKRGLCCVLLLCGAVFVSPSQEIHARFRRGARSYQVICRDEKTQMIYQQHQSWLRPVLRSNRVEYCWCNSGRAQCHSVPVKSCSEPRCFNGGTCQQALYFSDFVCQCPEGFAGKCCEIDTRATCYEDQGISYRGTWSTAESGAECTNWNSSALAQKPYSGRRPDAIRLGLGNHNYCRNPDRDSKPWCYVFKAGKYSSEFCSTPACSEGNSDCYFGNGSAYRGTHSLTESGASCLPWNSMILIGKVYTAQNPSAQALGLGKHNYCRCRTGRSVSSPATASMRPCLLSIRSG

SEQ ID NO: 2037 - DNA, 2516 bp, Homo sapiens; identical to SEQ ID NO: 2033

SEQ ID NO: 2038 - protein, 516 aa, Homo sapiens
MDAMKRGLCCVLLLCGAVFVSPSQEIHARFRRGARSYQGCSEPRCFNGGTCQQALYFSDFVCQCPEGFAGKCCEIDTRATCYEDQGISYRGTWSTAESGAECTNWNSSALAQKPYSGRRPDAIRLGLGNHNYCRNPDRDSKPWCYVFKAGKYSSEFCSTPACSEGNSDCYFGNGSAYRGTHSLTESGASCLPWNSMILIGKVYTAQNPSAQALGLGKHNYCRNPDGDAKPWCHVLKNRRLTWEYCDVPSCSTCGLRQYSQPQFRIKGGLFADIASHPWQAAIFAKHRRSPGERFLCGGILISSCWILSAAHCFQERFPPHHLTVILGRTYRVVPGEEEQKFEVEKYIVHKEFDDDTYDNDIALLQLKSDSSRCAQESSVVRTVCLPPADLQLPDWTECELSGYGKHEALSPFYSERLKEAHVRLYPSSRCTSQHLLNRTVTDNMLCAGDTRSGGPQANLHDACQGDSGGPLVCLNDGRMTLVGIISWGLGCGQKDVPGVYTKVTNYLDWIRDNMRP

SEQ ID NO: 2039 - DNA, 2280 bp, Homo sapiens
ccttcatcccacttaccgcagctccagagccctgcgggaggactcagagtcagggacacagcagcgtccggcgagatgaaggcgctcggggctgtcctgcttgccctcttgctgtgcgggcggccagggagagggcagacacagcaggaggaagaggaagaggacgaggaccacgggccagatgactacgacgaggaagatgaggatgaggtggaagaggaggagaccaacaggctccctggtggcaggagcagagtgctgctgcggtgctacacctgcaagtccctgcccagggacgagcgctgcaacctgacgcagaactgctcacatggccagacctgcacaaccctcattgcccacgggaacaccgagtcaggcctcctgaccacccactccacgtggtgcacagacagctgccagcccatcaccaagacggtggaggggacccaggtgaccatgacctgctgccagtccagcctgtgcaatgtcccaccctggcaaagctcccgagtccaggacccaacaggcaagggggcaggcggcccccggggcagctccgaaactgtgggcgcagccctcctgctcaacctccttgccggccttggagcaatgggggccaggagaccctgacccacggcccctccccacccccacccggctcacccccggccctgccagcactctgtctggtaccttcccctcctgcccctgcaccagctttggagaatggatttggagtgtcttgggcgatccagccagcgcaggccccccggcccggttgcttcctcagttcccggctgtgtccttggtgtcctttctccaccacctgtgagcagcaagactgccgcacgtgggcgctgggtccagacctcggctgccacgccccaggacctgcagccctcatgggggctggggatccccatcagcacagccaggcagagatgatacccaccacacacctgggggcccccacacccagtcctcacccttaacttctgccatgggaattcctccatctgcagcggtcacacgggcccaccctgcccttccccaggtcggcctctccgctgtctggagggaaggggatttggagggaggctgtcgtcgcccccaggaaagacgggcctgggggaggcgggacagtgggagaggcgcgctgaggatgagagggcacagggaggtgggttggggtgaggccacatgcggaggggcggggcgggggggggctggggggacaggcaccaagtatgaagaggatggggccagcggggcctgtctggctctggcgtgagcaccgctatgggagaccctggcttggaaagtgaacttgcagccttggatggggaagggccagatgctgggtgggtgcctgtcaccttgaggtgaccatctagggcagtacctgctgggcttaggacagcgcctgaggctgggaatacctgtctctgctctagcagaggctaaagcaggctagagcagtggaggggtggagttgatgaaaggagaggagtagatgagatggaatttttccagcctcatcctggcctgccctctagactccagtccccaagccctcagcctagtgggtgtcatggatggatctgggggtgtcagacaggctaccctgtgccagggagggggcagaatgggcctgcagcttcctgcagaggaagcaggactgggtagcagagccgggaaggtgggtggcccattacaggggggtccccagggtgtcctctggcagggctgtgactgctgcaagctctgccttcaccagtagctggtgccaggacagagctctgggacagcaggcagaggccgagcctgggccacagctcagccactgacttgggtatcagtttccccttctgagaagtacagagtgagacttaaagaacccctagatccccaccagttcaacactccattaactgggaagcccagagtcctgtccggcctgccaagttcatcctggtggacagcgggaggcctccgctaactgttctcttcttttccttattaataaaacacacaatgcctagctggggggtcggaaggcaaatgccctagatggtggggtcacgtctttctccttctccttcctccttctgctggctgaagtgatgactggagctcagcaaccactttgcaccatgaggcagcactgagcacggtagggcagcctggtgagaggggcctagctcgctgccgacagaagtcactgcctacctcagggtccccttacctgggtgggaaataaatttctgctgtgttgaagct

SEQ ID NO: 2040 - protein, 209 aa, Homo sapiens
PSSHLPQLQSPAGGLRVRDTAASGEMKALGAVLLALLLCGRPGRGQTQQEEEEEDEDHGPDDYDEEDEDEVEEEETNRLPGGRSRVLLRCYTCKSLPRDERCNLTQNCSHGQTCTTLIAHGNTESGLLTTHSTWCTDSCQPITKTVEGTQVTMTCCQSSLCNVPPWQSSRVQDPTGKGAGGPRGSSETVGAALLLNLLAGLGAMGARRP

SEQ ID NO: 2041 - DNA, 3748 bp, Homo sapiens; identical to SEQ ID NO: 1043

SEQ ID NO: 2042 - protein, 657 aa, Homo sapiens; identical to SEQ ID NO: 1044

SEQ ID NO: 2043 - DNA, 645 bp, Mus musculus
tgtttgtaagtgtctcctagttcaaatgtcctttgtccagttccccttgtaggactaaggaggaggcagaccaggagcccctcaacaagtctgtaagaactcctgcagaacatacctgagccctctgagtctctttgggcttgagaacggaatctccctgttccttatgtgataatcccccaccccacccccggtccttccttaagatgttctggctaatgtacacaaggaggtgtggatccagcaagtggtttcttctttgttttattattgtttgcttgcttgcttgggtattttttttaatcaacaagatattttgcagtgtgatgaaaatcgttctttttaagagagacagtgggaagtggttatctacaagattaaatgaaaaaaatgttaaataatgttaaatttgcattttttttattctgctctgtcaagaaagatcataaacctggaaatgtctgaagcaagcaaccttgcctgtcggcaaaaacctactttccttacactgtacatggctataagtttcatgggttggtcttgtagttagtttagggttccttttctttctataggtaataatttatattttatctaaatttaagcctcaataaggtctcctggatattttttttttacaatctg

SEQ ID NO: 2044 - DNA, 672 bp, Mus musculus
tcacgcggggcggcgcggctcgattgtgtgtgtgtgtgtgtgttgtgcatgtctgtgagtgtggtatatgtgtggatgtaccggggtggtgtgtatatgtatgttcgtgtgtgtatatatggtgtgagggttggtaagtaggtgtgggattgggtggagatggtgtgtatacttaagtgtgtgtgtgtgtgttatatgatgaatatggtgtttgtgtacatgcgtgtggcatgtatgatgtagcatgtgtatgctgtggtgtgtatgtctttgtgtgtgatgggaaagggagtccacagtgatgaggtagggggttatacatcttctatgtggtgaaacaggtctagtggagaatggaaaatgagcagccatccctactcaggaaagaaaatcaccgagcgggtccacaacacccaataggtaagctgcaggagtctaaggatggagtctgctgatgagactagaggtctagggtaacaggagatgcagtcattgtcacaagagacagacactcagcctggctttctagaccccaggcttaggcaggcaggatcagttctactcctttggtaaggcctgtcttgatcagaactagctagtgcctacaggttaagaccctcagtgagtcaagttggtaaagataaagaaatagcagggaatgatgctcttatg

SEQ ID NO: 2045 - DNA, 694 bp, Mus musculus
cgagccgcttttaactaagcctcaaactgattctctttctcaccatggagggtgtgtctccttaaggaagcaccactctttgccccccacccttcacttcactgtggcacttgggttttgtgggttctcttgccagctgtcttaatgaggaacaacactgatacttcacataaaaaacaaactctgagatcttaacatttcaagaaggttataggcatagtaacaaccatagaatgttgaaatacgtgggggtatcatcattttctatgcttgcatgggacccaaatatgtgactcaaatcaaaaccatctccatatgttgtctagccaaacatgtaatcctttattggggactaaaactataggcataactgtgaaggtgacctttatagaagttgaagttcagttcacctctcaaaagtgttggtctcccctgtggaaattgggtagcaatgacagattagggccacatgtaagtgagacttactgacaaatttgggaattacacatagagcacacggatgagggcttggtgaagggttatgtgtcattcataatgaaggctcctggatatatacctgcaatgccttgctttgaagtgtcagctctttgcaatttcttagttttaattttatgtcactaatgccttagccacatttcaatttttaagggcactcatgatcatctgctgatgg

SEQ ID NO: 2046 - DNA, 760 bp, Mus musculus
agccctacacaaatataattatactattatataaatcaaaacatttatcctactaaaagtatggagaaagaaattcgtacatctaggagctatagaactagtaccgcaagggaaagatgaaagactaattaaaagtaagaacaagcaaagattaaaccttgtacctttgcataatgaactaactagaaaacttctaactaaaagaattacagctagaaaccccgaaaccaaacgagctacctaaaaacaattttatgaatcaactcgtctatgtggcaaaatagtgagaagatttttaggtagaggtgaaaagcctaacgagcttggtgatagctggttacccaaaaaatgaatttaagttcaattttaaacttgctaaaaaaacaacaaaatcaaaaagtaagtttagattatagccaaaagagggacagctcttctggaacggaaaaaacctttaatagtgaataattaacaaaacagcttttaaccattgtaggcctaaaagcagccaccaataaagaaagcgttcaagctcaacataaaatttcaattaattccataatttacaccaacttcctaaacttaaaattgggttaatctataactttatagatgcaacactgttagtatgagtaacaagaattccaattctccaggcatacgcgtataacaactcggataaccattgttagttaatcagactataggcaataatcacactataaataatccactataacttctctgtttaacccaacac

SEQ ID NO: 2047 - DNA, 682 bp, Mus musculus
  misc_feature (438)..(438): n is a, c, g, or t
gcggctccaggcggctcgaggcggctcgagccccaaggtaacctgaccactgtcttggagagagacctcaggtccccaccagaaggtagcactagaatgcttcactcgcctgagagtaccccatctaccatcgctctcagctgacccttggtgtgctacagtggccccagtctccacctgcaggtcacagggagctcccaacactaggctgcagctggccttgggaaattgttcgtgagggctagaactaccccccatatttaactgtcactccgagggagacagttagacagggggcctgagaagagctcactccagggtctgcccctacatttgtgctgttcccttcctcagtctcgccgcatggggtcattctggcccccttttcacactcatcttctgtcctgtccacccatcttcagctgtgttgatggtatnggttgggtggcactgctacatctagtcacatttctaaatggagcacggtaggatcaactccatgtaggtttattgttaaatgcacccctattccctctcatcttgagacccatcttgcctgattaccatccaccagctcctggctcttctctctaacccactgacttgatcaaggtttgttgctagtgactgtgggcctgtcggtcttggttctgtaactgcttgtcttccctacaggagcttc

SEQ ID NO: 2048 - DNA, 646 bp, Mus musculus
ccgcggtggcggcgcggtcgagtacacacacacataaaaaaaaatacaaaatgtggaatgtaatctaacacatttttcttcttcataaaaaaatatttattagttgaacatgatttaaaaaaagtcacatttaaaaaaaaaaaaaaacttcaatacatacatcttttccctccggtgcctcctgagatggatatgttcatctggatctctagatttccactttctaatgggaaactgagccagaacaaagcctgccacatggcaaacacttggaaggtggtgggaccagaactggggaccctcagttttctggtacagtactggttttaaggaagtgccctgtggcaccaacagggaaccccagaaaggccagaaaaggcagtctggaaggggagccagtcagagcaagacatcctgagtggaggcacaggtgccttgggaggtgggctaggtaggggtcctgcatctggggcaagacagcctgagaagtggggactgatacaaaaacccagagacagcgggtagcaaaggtctagtttcccaaatgcttttataagaaagtgtttagaacaaggtgttttaaccgagggagagatgtactgagtctgggagctctcagtgggcccctggcagactagagagtctc

SEQ ID NO: 2049 - DNA, 713 bp, Mus musculus
gcggggcggcgcggctcgagatcatagactaaaggaaaaataaaagaaaaacccggacatgattagtagctacagaaaggatatgtggggcaagtggactgtgccaccagaaagaagaactggtaaggttgagcagacccaaatcccagggaatctcagaattgagaccagcaggtatggggccagctccttgcccatctgcctgatctggaacgtgccacttcacactcagaaacaaactggattccaccctgtccccagactctgcctttcccttcctgtctggcatataaatgccctgaggggaagtgtggatcctcatccctattctcaagtcccagtggcctctgagtacacaggagactgagaaccacaggaaaccacagcatctgtcccagccccctcctgtttctcaccccaggaaacgtgctgggacccttattatggtctgtgttctgcctcccctgagaggcttgctggcagtgctcaggcactccagcagcgaggcacacaggcagctaaactaggatggtcatttcaagctggtgtgctaatgcatacctcaagactaggtctaggccagcctggtctagaacatagtgagttccacactggccaggcttacagtgagaccctgtctcaaaacctaaaaggaaaggtagggaaacaacctttaggaaacttttgccctttatttcattttgttccactga

SEQ ID NO: 2050 - DNA, 244 bp, Mus musculus
ggtgtctatccggagaagtcagctgggtgacaccattttctgacacgaactttcctcccacgagaagccagccagccacatttgcgtgtctcagtttcctgagcctgccttctatggctttatgccttatgtggctttagagctagccctacattatattatcattagcttccagtcaattactctctgtctatcaagtgtgcttaatttcacaggtgtcgaattcatagtcattaacttatga

SEQ ID NO: 2051 - DNA, 707 bp, Mus musculus
cggcgcggctcgagctcgagccgcctcgagccgcaaaaagcaagcatgaaggaagatttgaatccaggcagtgccgccctctgacgtcatcactacaggtgtttgcgtggaaagaaaaccaactttgaaactatgaaattcctgattcataaatacagttatttctactttagtacatacaagataactcactgttattaacactcttttttattaaggcagttgcatacgttttcaaaagcaatggtgaattaagttgtcttccaaaactgtgtacttgtctggtcagctgtacgtgatcagttatctacctcagaggctatttttcttttgtgctgggacaggttgctggccctccctgtttccaccgaccaaatcctcctagctcaggagctagggctaagcagttacttcttttgagtattttttagttcttaaattttattgcttgtatttgatgatagatgtcagcgacatttcatagtttcaaaaatccttgctgctctgaaagtgtagattctagtgaaaattacatagtcataagagaaatgtggggtttttgttttgttcttgttcttggtttggtttgtttctgtttttgttttttttaagttgtggtattattggttttatgctccctaaaacttgtgcttgtgaagtcagactgaggcagcacaccctccgtggatcgagtatgttgatcagcc

SEQ ID NO: 2052 - DNA, 716 bp, Mus musculus
agaaaaagttttctcttgctagatgtggtagcacacacaagtccagcactgggaggcaggggcaagagaagggcacgtttgaggccagcccgggctatagagtagaactttatctcagaaagaaaggaaagtttcttgttgaaagaaaaagctgaatataataatttcaaggttaaaatgggaaatgatcacaatatgtaaagctagggacagaccactcagtgaccaactgtcttttgtaaacaaggaaaagggaaacattttgatggttctccgtatctattctaagcccttgtctcctgctttcccttactttttctccctcagttattctgactaaattgataatgaatgtaggtaaaatgttgtccctgccttcttaaaaatttaagtagacacttaactttactatggtgcctaactggtggttttcagcaaacattaactattagagaaaggaaaatattgtgtctttatagtttctttctaccctcacccatcacagtcctgtattcatcctgttcttgctgtttcagaggcgattgggtggtatccttacatgatactgcgtaggcgtgtcttagaggcaggggtactgagaaagcagcgtcctgaggaatccatgttatccctcagcaaatagcatcttggtgctttcagtaccacctctcacctcacctcagcctcatttgagttgctgagtcatgctgtggggg

SEQ ID NO: 2053 - DNA, 769 bp, Mus musculus
gcggctcgagagaaaatggcaaacgtaaatcatttttaaagggtaaaaattaaaagcttgctaataacataactttcatgctaggaccaaaagtgggtggagaaaaaaatagtaaaatatatattacctattccaaaactgatttaattgcagccagaatcttatggaagtttagaagtgatgtatagagtacaggaatcacccatggaaattctaaggtcttagaaagcaaaaggttccctaccaggacctaccccctagtcacttgggattacctgtgaagctcaaaggccctagtggcatcaaaggtgagtaagaagaagccgagatgctttaagcaacagcgtgaggttggcatcaacggggcacatttgttcttcacagcaagcccagtgttttcccatcttacccaatgtggagctgggtctgaaagtgtgccaagtgatcacctattgccaaatagcttttagtctttagatggccttctgactgtccaggtcctaagcctacagtaatcacgggcccagcctctagtgtgttctcttcccaagcaggtggatagtggagagagccctgactcaatattcactcacacatcattggtgaggagaagctaggaaggcaggcatttgccacttcatctatccacaggaggttccttgaagtctggcctgagaaggaggtgtcttgctggggaggatcttcatcatcagcatcaagctgtgaggggaaaggttgaacaaagggttgccactttctgaattctctc

SEQ ID NO: 2054 - DNA, 538 bp, Mus musculus
gtgatgacacacagctaaccccaaccagtctgttgaacacacgtcctcaaggcactcaggcacagttgctgtgtcaagacaggctggcccaatccaagttgctggggctgagagtcgtcttacggattggaggcggagggctgggcagggacggggaggtcggagaactccccagccaagtaacctgagattttcggagagaaagaactgctacaaaaggaggagtgggaggtgcggcggggaaggtagagcgaatgaattattctggtggccagttgtgcgttacttttcacaagtctctgtgctcctgggtgggtggagggggttctcggtgggatgcccaggaacactaaaaatcttttacagctaatctattgagggcaatgtcctcagcaagccgctccccccatcaccccacgggagatcaaagattcttcttgtcatgctgatacagtgtgacatgtgggagtagttgcacttgaatgtgacatctaccttttgaaatctaaatcctgcctccttgatgggggcggcgctc

SEQ ID NO: 2055 - DNA, 736 bp, Mus musculus
tccacgcggggcggccgcggctcgagagataatgttactatgacaacatttttactgtcctttaaaaagcattgcaatagcgtgtttggatatgcatcaatctaatcttgcgttcagtgaattaaacatgactaattaagtgtctattgcccttgattttgatattagaataggtgactacatgggtatttaatatttctatattctgcttttctagctgtttttacctagttagcttgtgattttgctgaatggtatgtaaacgtgtaaaaactgaaatttgacagagcaatccagtcaatgtgttaggggtcaaaaaaattgaaggctgtaacattttggtaaaaactcatgtatttgctacagtagtgcagcttaattacaacccagatatactgaaataataaattgtgaactgctagcatttaagatagattttgataattctggtttcatgcagtaatttactgtttgatgctgatggtgccataggcagtgtaattatggctatacagcaagatgcgtaaagaaagctctagtattgtacttgattcagatttctgaagggtgtgatgtttattaacattgggctgtattgttcagtgtgaataatgaacaatttataattacactgtcttcatggctcaaggcaattgtgtgtgtattcctgtaaccttgttgatctatgcttgattagagttaatcagactgattttttctttttttttcctttctt

SEQ ID NO: 2056 - DNA, 629 bp, Mus musculus
cggcgcggtcgagctcaggtacctcctgaaggtcctgccatcctgccgagtcttcagtatcacccagttctagagacgtctgtgcttttaacttggaacacacaggaaaattacctaagcactggggtccccccagctccagatgtttaccccaagctcagggctactctgcacaccccgggcttcattcttctctagaaacatggggagagtcccgggtgaggcttccagacttccataaagttttcacatcatctcgaaggattccatgtagggtggctaaggacagacgtgggtctcacgggatattgtcacagcttggcatccatccttcggagacacacacagccctttctgcccactcccatctgtgtggtggccttcccaggtcccttggatataagccagagtgttggagtagacaaagaagataaataaggaggttctcactccacagagatgctaggttgttttactcttccttcatttttctcatactatagtactaaccacacacacacacacacacacacacacaccaatagcgaaaattgtgtctccctttaacttatgactgttgtgtttgtgtaacaaaagccatctttttccagcaccaacttatatatata

SEQ ID NO: 2057 - DNA, 682 bp, Mus musculus
cttcattcttctactatccccaatcctaatttcaatatcaaacctaattaaacacatcaacttcccactgtacaccaccacatcaatcaaattctccttcattattagcctcttacccctattaatatttttccacaataatatagaatatataattacaacctggcactgagtcaccataaattcaatagaacttaaaataagcttcaaaactgactttttctctatcctgtttacatctgtagccctttttgtcacatgatcaattatacaattctcttcatgatatatacactcagacccaaacatcaatcgattcattaaatatcttacactattcctgattaccatgcttatcctcacctcagccaacaacatatttcaacttttcattggctgagaaggggtgggaattatatctttcctactaattggatgatggtacggacgaacagacgcaaatactgcagccctacaagcaatcctctataaccgcatcggagacatcggattcattttagctatagtttgattttccctaaacataaactcatgagaacttcaacagattatattctccaacaacaacgacaatctaattccacttataggcctattaatcgcagtacaggaaaatcagcacaattggctccaccatggatacatcagcaatagaaggcct

SEQ ID NO: 2058 - DNA, 754 bp, Mus musculus
cggcgcggctcgagatttttatttgcttattccttcatgtcggacgaggcttatattatggatcatatacatttatagaaacctgaaacattggagtacttctactgttcgcagtcatagccacagcatttataggctacgtccttccatgaggacaaatatcattctgaggtgccacagttattacaaacctcctatcagccatcccatatattggaacaaccctagtcgaatgaatttgagggggcttctcagtagacaaagccaccttgacccgattcttcgctttccacttcatcttaccatttattatcgcggccctagcaatcgttcacctcctcttcctccacgaaacaggatcaaacaacccaacaggattaaactcagatgcagataaaattccatttcacccctactatacaatcaaagatatcctaggtatcctaatcatattcttaattctcataaccctagtattatttttcccagacatactaggagacccagacaactacataccagctaatccactaaacaccccaccccatattaaacccgaatgatatttcctatttgcatacgccattctacgctcaatccccaataaactaggaggtgtcctagccttaatcttatctatcctaattttagccctaatacctttccttcatacctcaaagcaacgaagcctaatgttccgcccaatcacacaaatttttgtactgaatcctagtagccaaactacttatcttaa

SEQ ID NO: 2059 - DNA, 616 bp, Mus musculus
tttagattctccaaggaagctctgccttggggatcatctggctttagcttagataccagaccacgaagcctcgtggataatggtttcagtaaatgccagtgtccctcctcttagtgctatttcaaggagggaagtagctttccacactcagaatgttgggtgcatgatttcatcctgccaccagtggctttttcacctgcaccagtgccaccactgccttcagcccttaggctcacttgctagagggaggcatgggggtttaccagggcatacttcaagtttacccatgtgtatgttgcatccaagttgtttttaatatatatatataaatatatatatcaaaagctaattatctatttttatattgtttgcatttcatattcatggaaacaatgtttatcaattgttcttttctgatatattctcatttttaagcggtgctgtttacagttttaaacaaaaaaaaaagatgacccaaaaaatgctgctgctcgtgcagagggatgtcatctcaaagtgtctaggaccctccctcttatccctctcccacctggctggtgtcacactatccattctctttccacacggtaaggacagaagatgcccatgtaccgaa

SEQ ID NO: 2060 - DNA, 703 bp, Mus musculus
tcaccgcggtggcggcgcggctcgagcagcctgggttcagcgatggggctctgtgcctgagtctgccaggccagactcagatgcaggccaagtggctgggcccaacaggtgtacaggagacactgactctgctgtgtagctgtgtacagcacaggcgtgtgggactcccgccatggcgggtctacacaagaagaaagctatttatttgtgcagaggaaaaaaaaactgtctggaggggtgagaccttcagggtcttctcataaggtgtagctttgtgttgtttccagcgttctgtataaagcagtgattattttatggaccaagattccatggaactgtcacagtaaaagtgcaatatctgtcccaccactccccactgggggccccacaggaagctgctggcccgacaatcactgccccaccgggggtccccgggggccagggcctcctccctcagccccacccgtcttgcctcagcctaggtgaccagccattgtgagaagcacctggaagcctcaagccacctgcagtaaaggcagggggggcctgaggtcagtgggcttggtctctcccctgggcaagccccttgtggtctgaatgcccatgcctgcccagtgtcagccatgccaaggacaaccagcaatagtcccctgggctctcccagggccctcagccatagatggtgagacgggcagctccctcc

SEQ ID NO: 2061 - DNA, 549 bp, Mus musculus
gcggccgcggctcgaggaagcatggaaattattacgctatctttaaggtggaagttaggatgtcacagttattggcacaagtgctaaattgtaagtgctgtattggatagaggaagcagtggggtttttgacagagggattcatatgagtaagtcccttcagatgccattttctcagtagctgaagactcagccccacgtgttccactgtgattgactgaggctgtttaaagaaaggatttgaaaatgcaccaaacttcatttgtatgaaaagagtttggaaaaactctagaaagtgtattaagaaaatgcagttttccttcatgaagacgtgctcatgacctacgccacgcctgtcagtgtaatgaggagaacagatggggactggcatggactcccctctttgtgggcttgggaggtgtgctgactgcagtgccaaagaggtgaggcctggaaggggtgactggaggaacgcgtggagctcctcagccatgccagtgtagatggagcccggtatgaccgcacacgggctcccccgaggctgggagca

SEQ ID NO: 2062 - DNA, 711 bp, Mus musculus
ctcacgcggggcggcgcgggtcgagggtccggcctctgagatacagactctttaaagaggatttttattattctgaacctagtttcatgagaaaatatgttgagataaataagatcaaacaatcaaatgatgccagtggggatgaaagcacatacgttcctagtgtagccattggggtatcttctattttaaagactgcttgtctctatttttagttccaccagaaacataattgttggcacagggttggaatgtatgtcggtgcatgcctgtgatgtcatcattgcaagttaccctcaaaaactaagccagagccccaactcagcccgtgacctccgccctcagctacagaaacagctgtattcctgtcgagcctttgctgaggagctgggcttccacagggactcaagtggggaacgtggtgcagtgatcatttttctaaaattcctagtaatttctcagtgttctacagcagagaacaggaccccgtgtgactgacttcagattggcttctctttgaagtagggcttcctcactgtccatgggctgatggtatagcttaaggtctctctgtaagagacgccgttactgtcattacttcacgccttaaggaatcaagacctccaccagtctgttactccttcaaggtatgcttcatggatgatcacgttagagactgtttgccatctgttgttggggtaaatgatgtca

SEQ ID NO: 2063 - DNA, 432 bp, Mus musculus
ggctcgagtctagtctcatatttagattatttatttattagaaatgtcctttatttcagaataatttatgaatgatagaatatagatggaaacacattttcttcaggttgcactgtgagcgtgttttcatacagtgaatattgcttcagatttgtcctgggcccttaaatgttagtctctgttatttatcttgtatttaattatactgaagaaatttcagaaaacaagtgaaaatttactaagcaataggatggtttacatgtactttcaacttttaaaagtacttatgtaatatatgttgtggatttatgtaaatttttgttgttttgctgttcttgtgtttgttttgtaccaaagccaacagagattcagttattttattttaacagaaaattagaatttttttttttttttttttacgaaaacacagca

SEQ ID NO: 2064 - DNA, 715 bp, Mus musculus
gcggggcggcgcggctcgagccacgcccagcaagtgatgtctcttaacatggaaaggggtaaagaaagatgttagtacagatgggaaacaatgccggctcctctggagattgcatttacctatgtaacccatagtgtccttgaactctagattcttctaagtcatcgttctcaggactgagattacaagtacgtgtcaccacttctgactcctgcctttgaacatcaatctttgttttttcttaacacgtaaatattgatctccctgtgaggcggcctcttcatctcttcattctcccacccttcgtttattatgctaggcatagtactcagggcttcaggaatgctaggctgctattctttctctgagacatggcctccagcctgtttttcttagtttatcaatgcctttgctctccccatgaattagaacaggacatgctgattgtggacaaatagtatccaccacaattagagtgtagtaggttttaacttcagtgtctctgaagtacgttttcctgggtactctgatcctgactttgccagctgctggacccttcctaatatgtccaagtttagtttgaattaaatcaagttggctagttgtgtgttgtggggttttgttgtttttacttttcatttctgggactcaagctgcatactaaattcattgtaatgtctggacttaataataatgtatgtgagtatgtcgtcaa

SEQ ID NO: 2065 - DNA, 687 bp, Mus musculus
cgcggggcggcgggctcgatctcgagccgctcaaaatgagaatttaaaaacttaaattctgggctgcagagataatgactccgtggttaagaatagttgctctttcagaggacccaggtttagttcccaacagtcacatggtggttcataaacagtcttcagctccactctcaggagagctaatgccctcttctgacttctgtgtgtactagacatgcatgtcagggataaacataaatgaaagtgaaatagctgtacatatgaaaagaattttcaggcagggtttttcttgggtatcctggagttgaagatcagaatgcattgaactcaaaattcactcagagatacaaatgctggaattaaatgtgtgcacccatgccagaattaacaaaatatgtttattaattgagaattttgtacattttatagaatatattatattcttccctggtaactccccttgaggccatttagagttgttgtatgttcatgtggttagagctgaacacttgtgattagaaagttgtatctggaaagaggtgattttctctcttgttcatattcccaggatccacatggtggctcacaagtgattatgactccagttccaggatccaacactcttctggcttcttttagtacccagcatgcacatggtacacatatagacatgacgtcaaaccattc

SEQ ID NO: 2066 - DNA, 741 bp, Mus musculus
tccacgcggggcggccgcggctcgatcggcagctctgcatatctggaacgctgggttgtgtttctgagctgggtgatagaggtgctttgttcctgcagctggcaacagaagccgccattcatcgggaagctcgagggaggagctgtcagcctcggtttgcacattagtcttgctttcgtggttcaggggaactggaaggattgcattccgaacacccagcactgtcgcactcagacatgacagtaggaaatcacagtcttagaagttcttgcaaactgaactcttgttagaaagctctcctgtcacagtaatcctgactgtatttgcatccgtcccagccctttcagtgctcagtatacctaatttagtgaaaggcttaagaatgcttcctcccgatagaaatttgaagtcaatgtcatggtatttgcaattcaagtaccccttcatatgtcaatatgcagaaagtattatctcaaagtctcttactgcttaggcacttactcagatagaattgttgtgtttgcactaaggtaatttctactgtttcctgttttgaaactgggttgaaatgagcaaaatggccttttaaaggatcccgaaagtacaatacttggcatctcaagtgaagtgtgggggaagggccatccagctgctaaatgccaggcacacaggtgagagttctgtggtctgtattgatgggggtccctttctagagtgtgacagattccgtggaactgtctt

SEQ ID NO: 2067 - DNA, 715 bp, Mus musculus
cacgcggggcggcgcggctcgagattcttaccaattcggagcaagccggtggctctacttctgggtaacctgcctcttaaaagtgccttgatcccagtagtagattcaggctctacaggagccttccctcaggcagctaaaaccaattgtctcctctactctttgctgcacctcccggaggtggtctccatgtggcagtgatgccctcatcacccttgtgaccaccgctctgaatgttcaaaataagcatttcctgtccaagcaaatccctaaactccctcgtcctcattactcaactacctcagtctgacaactcaaggcacacaagcacctacttgcctcccaccatcctttactgcccttgtctttgtggggttggaacaaatgcaaactcctcagttccacaacccaaaactgctctttctggatcgtcttctccagtgacgttggctccctacaagagcgaactctccatatgggtcagtccctgtaggacaagccaggactatgctgtgcagtcaaatgccaggtttggagcatagcttaagaccgcagagagtaaggacttgagtggtggtggtgtgcagttgagagagctggaatggacgtctctgctcctgaccctctgggcgggtcgggtgatgacttctagatgcactccttaccctggagggaagttaaatttatacttaagatgcatttgtacatttcccct

SEQ ID NO: 2068 - DNA, 784 bp, Mus musculus
gggaatggtactcaccgcggggcggccgcggctcgagaaattattaaccactcattcatgacctacctgccccatccaacatttcatcatgatgaaacttgggtcccttctaggagtctgcctaatagtccaaatcattacaggtcttttcttagccatacactacacatcagatacaataacagccttttcatcagtaacacacatttgtcgagacgtaaattacgggtgactaatccgatatatacacgcaaacggagcctcaatattttttatttgcttattccttcatgtcggacgaggcttatattatggatcatatacatttatagaaacctgaaacattggagtacttctactgttcgcagtcatagccacagcatttataggctacgttccttccatgaggacaaatatcattctgaggtgccacagttattacaaacctcctatcagccatcccatatatggaacaaccctagtcgaatgaatttgagggggcttctcagtagacaaagccaccttgacccgattcttcgctttccacttcatcttaccatttattatcgcggccctagcaatcgttcacctcctcttcctccacgaaacaggatcaaacaaccaacaggattaaactcagatgcagataaaattccatttcacccctactatacaatcaaagatatcctaggtatcctaatcatattcttaattctcataaccctagtattatttttcccagacatactaggagaccagaaactacataacagctaaatccatt

SEQ ID NO: 2069 - DNA, 758 bp, Mus musculus
gtcccacaagaccaggaacacaattaacatatgcagagggcctaggacggacccatgcaggctccctgactatcagctcaatctctgtgagcccaggttagttagttctgtgggtaaaacaaagaatttttaaaatatccttttaaatatttctaagttttcttaatttagattctgtaatgggaattctagcccagctcctcttcccatgcacatcttacttcagtcagctgcagtcagcagtaaaattcctctggcctctgcaccagggcctgaggacttgctgttcaggaacgaaaacaatacagtattttagtgctgccaagaaaggacaggttctgtttaatgtctaccaaggtttcttctacgtcacaagcactatcataaggccaaagcttagtgtccttgttcaaagaacctggaagctgctgcttatcttgtaaaaagtcacttgtcacttcaagtcaagggatggagaactgatattcttttctgatcctgctcccattttggttagtaagtttattgaaaacagagtcttacttgtgtaaccaaggttgcctcaaactcaaaattttgtcactgcttccttagtgatggaattacagatgtgtttccccacctgacacctcctcctttttatttttgcttttcttgagacagggtttcatggatcccaggcttgactgcaaacatggtatatagcctagattacttcgaacttctgaccttctggctatacttagttttatggagta

SEQ ID NO: 2070 - DNA, 716 bp, Mus musculus
tcacgcggggcggcgcggtcgagatttgggataaacatctcaaattctcccaagacctccacgctttaactgccctacccatatcctctgtagcctatctgcatatcccctcccccttgtggcaacgtcatgctacacatcttctacagcaattcccagactttatggttttataagaccagaggttttcattttattattattattattattattattattattattattatggtcctctttctaaaggataccacctgttatcaacagttcagttttaaagggggttagtccttaaaatgctagaaagcaagacatggtaagctcactcatttaaatggattgactttagttttgaaaagatggaccatgctattatctcttcactgacaagcaaaacttcactgtgctccacaagaatctgagtctcttagatgggaaccattgtgaacctcaggacctttacatttccttcaccctctccatctgaagcgctctttcctctcctttacgcctctctcccactgattagctgaccccttacgctgcggatcctgattcagctgttgcttcctccggatggaggtcactgcggacagccgctcacgtggtatagtagtactctatgtcacactagactgtaagcccacggggcaggatcgtgtctgctttatttcccagtatgtcgtcaaagcaaacaaacgccctagaatgtg

SEQ ID NO: 2071 - DNA, 705 bp, Mus musculus
cgcggggcggcgcggctcgagcttcagtgacttgagagagagtagatagaacatagtgtcttttcagggggtttcgcaacctgccaatttaaatgtggatttactgcagctaatctttatattctttggtaagtcaagttcagaaatctcttgaagtattctgcctttcatatatttgtttctgaaataaagtggacatttgctgttgttatcctgtttttgaaattgagttatacaaccaaaccaaaggtggtataaaatttcagtgtactggcaatgcagtagtatttatcttacatacatttgtagttctttgtcaatacaaaaacgtctttgggtttcccctgtagtgatgaacaggaaagtagtgtgtaataaaacttgtaatgaaatgtatactaggtgatgacagtgtgctacgctttaatgtattcctgtaatgtaactttttctactagtctagagtaaactttttatagttttgtattgttttgaaccacaaagatttataattcgcctgtgttaattattgttcgttgttcacgaaggggctcatgatccaggctagcctggcattcgcaatgtagccaagagtgaccctgaactcctgattcctttttgcctctccctctggactgctgcagcacgcctcctttgtgtggctagggatcacacttaggacctaaagctgtaggcaagcactct

SEQ ID NO: 2072 - DNA, 740 bp, Mus musculus
  misc_feature (189)..(189): n is a, c, g, or t
ctcaccgcggggcggcgcggctcgagcaacggctaagaaacacgagactgctcaacatcctttgccatcagggaaacacagaagctcacttttcagttttcatctttctggagtcagaatggttatcgtcaagaatgccagtgacatggatgtagaggacggattccttcattgtctaagtctctgganaatagtgcagaagagtagtcagggactaaaagatggaagacagaaagggctgcaaagttccatcctagagactcaatacagccattgcaatgatgaactcacaaaaactgcatttacctgaacttagcctgctcaagacattgaaagtgtttcaaagtagcttttcctgttgtgaatgtacctctcagctagtctggtttctggttcagagctcttaggcacagagttgtcttgaacatttgcttacaggcacttgtgtagatatcagctgcttttttttgttaaatctctgaaataaatgcctaggcgttcaatggcaatgttatatcagtatgtatttagcttagttttaaaataagaaactgtcaaatactttgtagaattactggaccattttacacccctgccaacaaagtaagattgatccagctccccacattctcataaacattgttttgtttctttaagaagacaagttaaccattccatttattgggaatttacttaccattcagtgcatggcttagatatgtagtattcagtttttagta

SEQ ID NO: 2073 - DNA, 701 bp, Mus musculus
  misc_feature (472)..(472): n is a, c, g, or t
ctcacgcggggcggcgcggctcgagaggatgtattttcagatataaactctggttctttccttccttcctctctttttttcctctggaaatcgaagcatttgccactgtccaggatgaaccttgcagctttaacctgctggcaatggcgaacaattttactagactttatgttttaagataattaagtaaggggaactcctaactttgtcctccagagtctaacttgggtttctgttaactggttaaagtgacagtatcttttttccttaagccatgtgttcatactttctgattagattgcggttgatatgaatgtttgcatctaaaatcataagttgaaagaaaaagaataccaactgactttcagacgagacccacaggaagcaacaagaataaaatccccaagtctaaaaggacgtggaaactttacatccaaatatgcaaaatgagccctgaaaaccttcttgtttngttactgggtcagaggagaatagtgaaaagaatagctcacttaaggaataaacaataatcctgatgcctgaggcaaaactagtttaagaccaatcagaaggggtatataaaatcaaaacaaatgtttagaacaatccattcagcagaaaccctgaaaagataaattttaatgaatgcttctagaaacttccaatgactcataaagaaaaaaaaaaaaaaggcctacctt

SEQ ID NO: 2074 - DNA, 721 bp, Mus musculus
gctcacgcggggcggccgcggctcgagtggcaggcctcccgtgagaagcggagtacttgtgctggaccgtgtgaggatccatatcacacaagatgaatattttcctgaccttaggtgcttttatattcagctcaacattctgaactcaggacttggcacgtaagtagatagagataatcatcccaagtcctgttgtagcggcttgaaaggctccatagaagcgacatactaaactgttaagagcaacagaagatgaagataaaaatgagtacaagccagctaccatggctcacctttatgcccagctcttgggacctggggaactgaggaattcctatgtggactgctcagtgaggcgtcctggttcttccatcctgttactttccccagtgagatgcagatgtctttcgacagattacctccatggtttaggatgcagagactgcctttcttttacgtcagactcaacacaggaaagccgtgaggatgcagccgtcctgttgacttcagcaagaaaacaaaccattgacttgggtcttctgcagcttttgaattggaaagacggtgtttgcaagtagaaggaagatgctgaatttgaaacaagtgcttaggttctgtggcgtgagtcgttttctttttaaaagatccaaacaagaagactgaacaaataccaagtgtgggtgacttcaggtttttttaatgtcttccaattttaacacta

SEQ ID NO: 2075 - DNA, 773 bp, Mus musculus
caccgcggtggcggcgcggtcgaggaggagaggagaggagaggaggagagggagaggagagagagaattgatttggtgtcttttactttacctgaaaatactgcgtttcttgtggctgctgcaaatgaattcctcctcctctttcccaaagccaagtacttggatttgcctgcaactctcacttggagaagaccacacagctccagcagggcagccttccttctcttaatccccactcgaatgtgatgacacacactaaccccaaccatctgttgaaacacgtcctcaagcactcagcacagtgctgtgtcaagacaggctgcccaatccaattgctggggctgagagtctcttacggattggaggcggagggctgggcagggacggggaggtcggagaactccccagccaagtaacctgagattttcggagagaaagaactgctacaaaaggaggagtgggaggtgcggcggggaaggtagagcgaatgaattattctggtggccagttgtgcgttacttttcacaagtctctgtgctcctgggtgggtggagggggttctcggtgggatgcccaggaacactaaaaatcttttacagctaatctattgagggcaatgtcctcagcaagccgctccccccatcaccccacgggagataaaagattcttcttgtcatgctgataagtgttcaatgtgggagtagttgcctgaaatgtgacttctacattttgaaatctaaactcctgcctccttgatggggcggcgctcaaca

SEQ ID NO: 2076 - DNA, 684 bp, Mus musculus
cgggggcggcgcggtcgagtccacacattggttcacctcctccagcttactgtatcctggtcctgggtgacacttttctctgcctagcctctcaaattctattctgatgtttatagccttgtctgccttgctccaaaccacctttctctaaacatgctcaaaaatttagaaggcaaagtgcagtataattattaactcataatattatgttattatggtctagtcagacaataaacctgaaaatatctaaatcaagcaaccttgccaatggcaaaaccctactttaactactgtaactggctataagtcttatcgttctgtttgtagttgtttagctggcttttctttctatgggtaataatttgtgttttatcaaattctgagcctcagtaagcttgctggctacttttctatcattgtttgtgtttatttttaaaagtaaacattttgactctctttctggtactttttcctacccatttttcttcacagatttgaggaaatcaggttctatcactgtaaactataattattcctattgaaataaaactatcagttataatgtaactatttttatttaaatgggatacacttgtcaaagtaatgactaaagaatacaaaaagtcatgcacatgaccatgtcaaaggaagactaaaactaaaatccttgtctatgaaaaatgt

SEQ ID NO: 2077 - DNA, 736 bp, Mus musculus
gcggtggcggcgcggctcgagtagcacagaccccacagttttctggaaggctgtctccaaagcacacagaagaacaggaggcttcctctgcaccctgatttgtgttaaagattcaagtcttgagaaaaagcagcacctctctaactgtggcacgccgctctctctctctcccttgcaaggcaaagctgagcctcctttgagaagaatgcatgtgagatggcgtgctgcaattggccactggctaacagagatgctgtcacaaagtaatggagtgacacagcgacccactggtctcttccccaccaagagttgagtgctacagtttgcaagagtgtttctgttaagctgattgtgtggcagaaccttagtagacttccatgatgactacggattgacattcttctgactgtcccttttcatttttatttcgaagctataacaaggtgaaaaccggatgagatatatcttattagtgtgtctcattatataggggaccactttttccatggacaaagtaactataatcatggatcacaaatatccaaacactgagaaagggagcaaattattgcaaagagttgggaagcttttatgaagttaatttgaagaaattaatctctggtgatgttatgtctcctataaagtacagctcctggcaacatgctggaccccgagacaccagaagcggctttctatgggcccttccccatgacagcacctctgtagatgtcacagg

SEQ ID NO: 2078 - DNA, 670 bp, Mus musculus
ggctcgaagcccacatcgaaaggcctgcaggagaaatcacagtgtgccctggaggagtatgtgagaagccagtaccccaaccagcccagccgctttggcaaactgctgctgcgattgccctctcttcgcacagtgtcctcctctgtcatcgagcaactcttcttcgtacgtttggtaggtaaaactcccatcgaaactctcatccgagatatgttgctgtcagggagcagtttcaactggccttacatgtccatccagtgttcctagactttgggtgtttcccacccaatcctgctccctgactccctagagactaagaggactctccctgaccaaggactaaaaagcctttggggatgctggtatgatggaccaggcaggccaggcagacgggaggagggctgggaacaagagcagcccactctgcaggaatgcaacctgagctgcaaaccaggagaaaaggagactcatttaggatctgatctgtaagtacattggaaaggaaagaaaaaggacctcgtgtctggtgagaaaatgaaaaaaaaaaaaaaaaaaaagaacgattgggaaagagaggcccttgagaattttattaaattagatgggcccttccagggattcttgggggagggatggggatatatcctggtacagaaaattactcatttgg

SEQ ID NO: 2079 - DNA, 690 bp, Mus musculus
  misc_feature (592)..(592): n is a, c, g, or t
tatttgagaagtcaggtctgcaattgcttgacagtgtgcggaaaacctcccatccttatgtagcgtgacaggggcttttcgcggaggagaaagtcactgaatcctgtcagtgtaggtcacctccagctgcctgacaaaatcagcccatgaaccccatggaagccaaccccaactgaagctgagataatcagaccaggaagtgaaaatgacattcaaactaaattatttaaaacaaggcatacctctccccaactcagtctaaagacacaatttcattttgagaatgtttacagcccatttaattaatcagtgaactaaaagtcatagaaattggatttgtgcaaatgtagagaaatctaccatattggcttccaaaatttaaaaattttatgccacagaacatttcatccaaatcagatttgtacaatagggcacctgaaaagtgactgcagcctttggttaatatgtctttcttattcctttttccagtgttctagttacattaatgagaacagaaacataaactatgacctaggggtttctgttggatagcttgtaattaagaacggagaaagaacaacaaagacatatnttccagtttttttttttctttacttaaactctgaaaacaacagaaacttggtcttcctactcttacattctaaaccgatgaaatctttaacagattac

SEQ ID NO: 2080 - DNA, 761 bp, Mus musculus
  misc_feature (684)..(684): n is a, c, g, or t
ggtggcggcgcggctcgaggtatggcctgcctcttttatttttctcttattttgtgatcaataatcactgtacatatagatatttagccactttttttagctccatcgacttcagtggttaggtcagtccccatcgagacaccggacttaaagaactgagcattgataagaactcagtatggctgcataggagacaagaacaagcagtgatctagtgattcacacctgtcttgcctttactgtattcacaggagctttggattgagaagaattcagtcaaggagcaggaggtaggcttaaggcaggcctggataaagtatggtcctggaagatgtcccaaagaaattcaaagatgattatttctttagtttttgccttgtcctcaccagtaattgctcccatctagggagagggagggatattgatgtctctcttttaaacatatgtttactcttccaaggtgacttatgggactaagaaaggaagcaaagctttttaccaaaagtagacttaaactttgagtttttacgttgctgtttatatctctaattcagcactcttattgctgtagctaagccttttcgattctatattaagtagagttgaaagtggagatctttcttgagttcttagtagtggaaatgctgagctctcccataaaaatgatgtgcctgaatggtttgncatatatagcctttattatgtgatgatatgatccttttattctgaatttcttcaggacttttaacataaggggatgt

SEQ ID NO: 2081 - DNA, 244 bp, Mus musculus
agggatagagattatgtcatctctttctaacataagctaaataatacaaaatcaaactatataattattatgaactacccagaccaaggtatttaatgaatggcatcaatgaagtatggaaataatttttgggtgtatcttgagtgttttttttttctaaatctgcctgtgttatagcccctatgaatgtcatgtacaattgatatataaactgaataaatatttgtctcagatcttcgaaaaa

SEQ ID NO: 2082 - DNA, 707 bp, Mus musculus
gcggcgcggctcgagatctaccctcccctttgcctatatgagagtgctcctctttccctagccccttagttaacttttttttttgtttgggagaaacagaggcttaaactggctcggtggctcgggcagaaacatagggtctctatgccccatcccctaaagtattgggaatgtcaagccgggttaatggggtttggttgtccttaagacaagggtctcgactattagtaagctggaggcatctcttctcagaactggggtggttctggagctggccagggccagccatgatcttggaattcacatctcacaacaaatatacataatatggattgattacatttaagggagaaatgggtctggggtttactaatggtctggctttcctgaaaaagctggtagtggtgttcagcttgctacttccttgctttacttgatgggacaggaccgagaaataggttccttactctaatgaaagtcataagtaagtggaagtcataagacggtataaggtctgcagttatcatcggctaggccctctttgtcctctatatggaaatattccaagctttggaattgaaaataatacccattcaagaagtaaacagttggattccagggccagcctgtctggattggtagcccagaaatatagaactaatcgttaccctccaggtttggggttgaccgggggactatagaaacca

SEQ ID NO: 2083 - DNA, 803 bp, Mus musculus
gcggcgcggctcggagaaatatccctggcaatctgtagttgtaagaaactattcaggagtaggagcttcagggtgtagtggtaccgtggtacctgcctttgatctcagcagcagggagacagaggcaggtggatccctgtgaattcaggcctgacctggtctatataaggagttacaggacagccaggctatacactgaaaccctgtctcaaaacaaaagtagaagcttaaaaacaaaactaaaaaccaaacaaacaagtaaactacttggacttccttgcagtgttaagaaatcaaaatattgaagcgtgtctgatttctttgagaaaggaatcatgacctaggttcatatgtatattatcagagaatttagctttgaagagatataagtcctatgcttgtatagcagagtcacattttaatgaattttccccctttggctgttaagagatctaaacgtatcataacgtaatccttgacttcaactcctctgagtgaccatgtggcgatcattccatgaagctgacaagcaaacttatgctgcgtaggttgttttacagggtgaaggggaaagtgggcagccaggcctttgcacactgcaagttgcctcaggcagggtcaggcaatggagaactgtatcggtttggttgcccacaagacccagaatgtttatcactgtgtacaagtcagtatgtgtgagtcttagcaaaaataagacatgatcagtttgtttcagctaagtgataacaactgtttcagaactaagaagacaccaccttgttaaacatacacacttcggtgtt

SEQ ID NO: 2084 - DNA, 539 bp, Mus musculus
gggtggcggcgcggctcgagtcccagcctctctgggctgcctaggtttccctgaccaactcatgattcctggcatctgggcctgagtctttactctaaccccacagctgaggtggcctggatagctagctatctgccctaacaggtaaggacagagacctgggagctgggcctccccctgactctgtgactcccccacccacaacagactcctggtcaccctgccccctgcgaggcagtgcctcagcctagcacagaagataaaaatcactggttcttagaactcaaatattagacaaaaatcttcaatcagaggagtaacccagtaagtaccccagccggcacaaggagagttgtgggtctggccttttatctcttttcctctgtcagggtaggtctgggggggggtccttctagggtgtgcccctatgcccaggactgagccatcagggacataccccccaaccccaaggctgcagccatactgtgttacaggcttggggctggggcaggcttggactcagccctagacacgaaggg

SEQ ID NO: 2085 - DNA, 511 bp, Mus musculus
aggtggcaaacaagttgctgagagcccaaagaatggaagcgaggcggcacatcagtatgccaaggaccccaaagcactcagcgaggaggactccgagaagctggtcccgaggatgaaagtgggtggtgatccaaccaaggactgtttggcaggcaagccctcagaggccacctcagacagatcagagggcagccgagatggccatggcagtgaggagaacgaggagtcaggcatcgtggactttgtggaggtgacagttggtgaggaggacgccatctcagagaagtggggtagctggagccggagagtagcagaaggcacagtggagagggcagactccgactccgacagcacccctgcagaggccggccaagcctagacagggcatcgggtctgaacctccgcactgacgagggaggtgctctgtctttgaagagagaagaaagccccgccccagtggctgtgggccacctcaccagcgactctgagcaggcgtgcttcagtggtgcct

SEQ ID NO: 2086 - DNA, 494 bp, Mus musculus
  misc_feature (353)..(353): n is a, c, g, or t
gtggcggcgcggtcgaggaaaagaatagctcacttaaggaataaacaataatcctgatgcctgaggcaaaactagtttaagaccaatcagaaggggtatataaaatcaaaacaaatgtttagaacaatccattcagcagaaaccctgaaaagataaattttaatgaatgcttctagaaacttccaatgactcataaagaaaaaaaaaaaaaaagcctaccttaggacgggcaagacgtccacctcaacagcacaaagaggtaaatattttaacccaaagcagcttccgggcgggtagattttggtctggatggggctgtccataagaactcccagttctttcccttcctggtntgggctgtaaggtctctctcagttaatgtttcttagagatcacatctggcttcctgggacaaatggttttttggttcaccctgggtttaaatggggattggagaatggtctttttcccaggaaaggttttggatcactaaa

SEQ ID NO: 2087 - DNA, 531 bp, Mus musculus
cggtggcggcgcggctcgagtatcatttcttctgcacaaagacgtcttctgttcaccctgaacattttaaaatgcagaattttatgtgactgctttttgcctcacaattatgctgtgaattttacaaaaatttattttcttttttgataatttattgtaccaaagctgtttttatagcacatagatgtctgtaaccaataatgtcgcaggcctgcactttgacacaggtgtaacgagaccgttttaaacgtcagttgaaatgatggctgtactattgcttaaacaaaactggaactgttgttgaatccatagccaatacatttacagcaatcttgtactggacagaatagattgacatctaattcaagattacaacacctgtcacattctaaatgtgttcaggcttctgaagggaaagggacactggatccagaagctatggagccagcagttgatcttgtattcctgattaacttccttgtaaacttgaacttgagaccttgattgaaccgacaggtccacagtaggaac

SEQ ID NO: 2088 - DNA, 694 bp, Mus musculus
tatgccttcagcattatgtgttaccagttgaagagcagaactgctctcggtctttatggtagtcaccgtagctttcgcagcttgtcaggggccttggtgttgatagcagtcataaccgaaagctgctcatagcaaatttcacttcacactgtcagcagaggtttgttggtatgtcctttgtaagaacaggtattttaggtaggaggtttttggttttgtttttgttttggcgtctttaagactatcatcctctagtcttttttgtttcttggttgtcttttgttatttgtttttttccttgccactcattgttacccagatctttaaaaacacatcccatatccaggaagtactaatcaccaagattgctgaccacaccaagttttacactgaagtttcacctcattgctctgaccaaagactgcttgttctggttttaactcaaaggtgaagcattttccctgagctctttcctaaaagatcccatgcagagcggacttgacttttcctttcctattggtgaatagactacttagagaaaatgggagttgaccatgaacagagcgagacagaaggatggacggttgttttcagaactgtatttgaggaaggaatagcacagctagacgcctcgaacattgtctaatgttttacatggtctgttcataaaattcccttttctgtttgtaaggat

SEQ ID NO: 2089 - DNA, 538 bp, Mus musculus
gtggcggcgcggtcgagatataaaacacaaagacagagattggtctgcttgactttcccaacccaattggccccagtggagagccatccaaactgaggaaaattaggggactccaaaagagttgattctggcacattcttgccgctgcccccaagttaacaacagtaggtaatttgcacacctctggctctgtgcctttctattaggactttttggcagaaggtggagagcgggaggcttaagaggggatgtgagggaagaggtgaaggtgggaccacatgggacaggccacggctcctctcatggcgctgctaccgatgactcccaggatcccagacgttcagaaccagattctcattgctatgtatctttcacgttgttttcgctgctattggagggtcagtttagtttagtttggttgttacaatgtcagactgccatgttcaagttttaatttcctcatagagtgtatttacagatgccctttgttgtacttttgtttttaatggtgatctatttggggcttaatgtgattacc

SEQ ID NO: 2090 - DNA, 806 bp, Mus musculus
gggtggcggcgcggctcgagatactgtatatgcagaagaaagaagacaggcaatctggggaaaggaaggggacctgggaagcactgccttctttaaggaaagacacaccaatagatgagatcatcccaaaggcacagggaccacagagtgtgagtccttagtgacgagtcaggtgagctctggtgagcttggagaagccagccccaccagcagagcaggcacggcagggatgggacaagcagggacgacaattccagctggacactggtcccagtattttgctccctcttatataccgtgaggcagtatcaccgtgggatgaaccatggtagcacgttttgatctgtcagcactcaaggatcatggtagccttcgggagctttaggttttggttggtcaccccaacgatcagctgtagttgaatgtgtttcttatgtgcctggtttcagtgttagaaggtgaaatagagtgtgcaaaggacactgcaaaccacttcggatggaagttttctcattttccagactattttcggtcagcctggtctatcaagatcggtaaccaggtcttcaggaaagggttggcttctatctaggacatgcctgaaaggattttattttctgataaatggctgtatgaaaataccctcctaaataccctgcttaactacatatagatttcagtgtgtcaatattctattttgtatattaaacaaatgctatataatggggacaaatctatattatactgtgtatggcattattaagaagctttttcattattttttatcacagtaattttaaatgtgt

SEQ ID NO: 2091 - DNA, 871 bp, Mus musculus
gcggcgcggctcgagcaatggtttctgcctgttttaaagctgtgggcatcatctcctttgtctttggaaacacattaattttagaagtacaaaagggaccgttaagggaaagctaatagacagcatcctgagagtcggaaagatcacccaaacctcaaggggtccaaggcatcccataattataaaacagcggcttctagtctgtgccttgccttgggttatttcattttatgaagcagaatttgactccattttgagagatacagagggtggcaggacaattctgcacttctctatgtttgtccataccaccacctgccctgcagtacccaggaggcagatatatatgcctgtaggtaagaaggtgccatatggacacaccaatgtattcagaaaaatgattaactaatgaatacaaccagattaaggaaacgtgttccacagtcccctgaatcacataaagaagaggacacttagaccacaatgacaagagcttcacttgacccatcagctgaacacccatggggtcaaggaagcagcaggcagggatctggctgccacccattcacctcaaacctgtcccttgcctcggcaggtctgatccatcatgggacttgactccaaaccacagagagcttggttttgtggtggtgtccctggcagctctctaagaactttatctaccactgctctccaacttggagattctctttgtagcctcttttatccccattgtagcctttctataacctctattgtacgtagatataattaccatgtgatgtataatgtctggtctgggattaatatgtgtcttagtcggggttcttttcctgacaaacattatgaccagaagtagtggggaagaaag

SEQ ID NO: 2092 - DNA, 542 bp, Mus musculus
attcagtattacttttgagtatttcgttaggtgtcaatcacagcttaagtgtgtgctctgtagcctgtatttgaggaaatctgctgaaagcaaagtctttctattctttgcctattccaaagagctaaaacatctaacccaggaaagctttgctgctttgttattgttgtcattgttgttgctgctgtattattattttacatcagaactgtaaggactgtgaataaatataagagccaagtagagaggcttagttaatgcagaatgattgaggagatgataaaatcaaaatatttaaggtagtagaaataaaactgattatgtatgacttgttgcagcagaaagaaatctagatgaacaaatgagaatttagagtcatgcctcagttaaccattacattgtacactgcacttcaaatcagaggaacctgggtttgctttttgaaaaatttttattagtgatctaaaacatggctagcatgggcttagcagatgaagttatttgaaatgagccatccgatattcctagcactatattttaac

SEQ ID NO: 2093 - DNA, 713 bp, Mus musculus
gggtggcggcgggctcgagccacagtgccttccgcctagctgccagcagagtccctctcgccccagcatccatccatcctttactcttccatcctgcagagaatatatccccccaccgctccccctctacagacaacttatcacgtttttgaaaactccttaatcactcctaggataggtccaaactccccatgggacctcaatggtagtccctgcttgacaccccaatctgttctttagatccacccctaccttgctagagtcaatttgatcaccaggatggttttagagacttagggtcctgtgctctgcggcctgtgtcaccctgtttcaccagctgaacagagcacaacgcaagcttcctggtcctctcagctttccccggggtcttgcttcatctcaaatgctacctttctcaggagaccttccctagatgcctgagactgtatcgggtgccctgctatgcagaccctgcaacccgccatttgtcacagtgcattactgtcatctaagctctccggtgttcccttcaccagacatcgagttccttgaggttaggaaccgtgtgttctatatcttggtgttcctagagcctaacattgcacttggcaggtgcccaataaatctttgctgaatacatggaaggaaaatagagggaagaagagaggcaattcgctcactgaaactgaggatgcagtcgccaagggtgagga

SEQ ID NO: 2094 - DNA, 681 bp, Mus musculus
ggtggcggcgcggctcgaggacaggacgaagctagtccgaaggggttgcgacaacctcagcaatgtggagaagcctagggcttgccctggctctctgtctcctcccctatggaggagcagagagccaaggccaaagctctgcttgttacaaagccccggagtggtacataggagatcaaaatccaatgctaaactcagagggcaaagtgacagtggttgctcttcttcaagccagctgatacttgtgtcttctgcaggcatccagattggaagacctgcgcataaaactagaaagccaaggatattttaacatctcttacattgttgttaaccatcaaggatctccttcccaattaaaacactcacatcttaaaaagcaggtgtcagaacacatcgcagtgtacagacaagaagaagatggcatagatgtctggactctcttaaatggaaacaaagatgacttcctcatctatgacagatgtggccgtcttgtgtatcaccttggtttgccttactccttcctcacattcccatatgttgaagaagccattaagatcgcttactgtgaggagaggtgcggaaactgcaatctcacgagtcttgaagatgaagacttctgtaaaactgtgacctcagctactgccaataaaactgcggagccctcagaggctcatagccacc

SEQ ID NO: 2095 - DNA, 785 bp, Mus musculus
accgcggtggcggcgcggctcgaggtccatctaggaaaagtcacaaacgttctgaacatctcaaaggattcgcacacacatttgcagatgctccacagcctccacgtggcaacttgccgacaggttaccgtagcacatggtgtaactcgcagtctacctttttagtatctttaattgcattgagaatagattccttttcctgctccaatatctacaagcaagcagtgtaactcataccttgaatttagaggcatgaaaataaagtcccacccctcctagtttgtagggaggtatttcataggcggacagtcttctgagtgaggaagcgggagtatggatacgtggctgcttgtatagacctctcatcctgaagctcgtgtggctgcctaagtgtcagctctgtggttttgtacagactacacatgcattgcaaagcctgaaccaaatgacacaacccacgaaagcttatcagaattgggcaaaatcattaagtttagaagacaagggccactatagctgtccagcatagaatttcttctcaacttcaaagacatgtccttgaaatttcagcccactcagtaatgagtgggccagttttgctctagagagaacacattttgaaaattgccaaaaagtcagaagaaatgtactactgtataaagcaaagctgtatatactgagcatttttagcagagtaatatttatttgcatagcctatttattgtatttcgtattacactgttattaaataccaggatgaaatcactgaccagaagcaagaactc

SEQ ID NO: 2096 - DNA, 789 bp, Mus musculus
  misc_feature (549)..(549): n is a, c, g, or t
agccatcttttccttcttttcttcaaactgaaatctttctatattggaaaagccattgacgtgttaatctctcctaagctacactctctttcatcttgtgcctttataaaagtgcatggagacacacaagctacctatgtctagtgagaataagctgtcaacatgtaggcttgcaggctaaaatcttttaggtatatcctcatgcgtctgtccattggcttctatgccactctgcctcatggttgttgtgtgtatattttaaccccagctgcaggggttagtgtctgaaatcttggtcctctgctagagagaacaacaattttcctttagggctaggatatgaaatctcttctggagtaagccttggagtctgacagtggttttgagtctatgaacagttttgaatttggggagccaagccctgtcctgggttgtttcacttaagccctctattttccacagactctgtgtattcctcttgctcccattccaactgttcccacccaagaaggatgccttgtgcttctgcacattttactcagtcgtatnggcctgtgtggtagccagagatccggttagaggactggtaaatggaattagagaggtatgagaaaggattttgcagaaattggatgtgctgctgtactcctgtaatcccaggccctgggaagtgggggcaggaggatcactacccatccttagctacttggtgagtttgatgccaaactatgccacatgggaccaggtctcaaacaaaacaagcttgctttgcggtttgctacatcttag

SEQ ID NO: 2097 - DNA, 722 bp, Mus musculus
caccgcggtggcggcgcgctcgagcaatcattttttattcagacattaagattttataactttcattacttcaaggaaggaatagcccagctgaatgttagagggagatgtcaccttttaagttccaaaacacagccgtatgttgccgagagcttagctgttcgactctttgccttgtaagcatgaggaacaaactttgatccccaacacccacataaaagagctaggtgtgtggttgtgtttgtagtgccagcaccggtcaaggagattcctggtactttctggctaaaagcctagcatatttagtatactttaggccagtgagaagctgcctcaaacaacaacaacaacaacaccacattgtagttgatgccctacagagcaaccccagaagctgtcttctggccttcacgtacatatgcatgcaagcatgcacaactccatgcatgcacaaaatgtagttattgagaagactccaaataaaactaatgattaaaagccatgcacacttgtaactcggtccattttgaaaaatatgataatttcttttttatcctatgcatcataactactggattacttaacatttgactattaaggctttaactgaataaaagaagcataagctaaatccaaggggagtgggatagtgaaccatatcctagaaaatccaagagttcaaagagctgaattcccagcttaggttaaagtcagtgtgaagt

SEQ ID NO: 2098 - DNA, 621 bp, Mus musculus
  misc_feature (555)..(555): n is a, c, g, or t
cgcggggcggcgcggctcgaggttaacttgcgtcgagtttgatgtcgattcctgtgaagaagagctttggcacgtgacagacagtgagttacaaaacacagcaaagcacggaattttttgcagggacaattttggaaccaacagaaaatgtcactttttagttagcatcttatgtatcacttttaccggctatttctaactttggaagggaaaccttgaagcttgtgtaacttagtggaaatgtgtgtgtcgcccttaggatgggtagccaagtctcactaagctgtgttaatctaacttgtatatatgaattgtaattaagagtttggattcacctgtttctcacggtttaaaagtgatgggtcattgcgaagtctggagatgtgactagtctatgatttcaagctgttagaagtcaggaagctctctgaaatgctaaaactaagattctagttttgggctcaaattcgattaagtactgtttgtatgccagagtatgtgaggtgtaaatgtagtggggtacttttcacccttgtagctgtaaaattcacattntgtagaacagaaaatagcttgtactactgaattaacaagttatactaaagtatcatgtcctaaaaa

SEQ ID NO: 2099 - DNA, 669 bp, Mus musculus
cccattatttaaaattattaaccactcattcattgacctacctgccccatccaacatttcatcatgatgaaactttgggtcccttctaggagtctgcctaatagtccaaatcattacaggtcttttcttagccatacactacacatcagatacaataacagccttttcatcagtaacacacatttgtcgagacgtaaattacgggtgactaatccgatatatacacgcaaacggagcctcaatattttttatttgcttattccttcatgtcggacgaggcttatattatggatcatatacatttatagaaacctgaaacatggagtacttctactgttcgcagtcatagccacagcatttataggctacgtccttccatgaggacaaatatcattctgaggtgccacagttattacaaacctcctatcagccatcccatatattggaacaaccctagtcgaatgaatttgagggggcttctcagtagacaaagccaccttgacccgattcttcgctttccacttcatcttaccatttattatcgcggcctagcaatcgttcacctcctcttcctccacgaaacaggatcaaacaaccaacaggattaaactcagatgcagataaaattccatttcacccctactatacaatcaaagatatcctaggtat

SEQ ID NO: 2100 - DNA, 740 bp, Mus musculus
ggtggcggcgcggctcgaggttcccctgaaaatctggctcaaaaaatcattatggatggagaaggaaaatgacatgataatcctgtgtgtagtctgagcattagaaggtagaagcaagaaaaccaagagttcaaggccagtcttggttgcatagtgagttcaagtctggactgtttaatatctgatctcaagaaaaaacaataggaagaggaagaggacgaagacgacgacaaacaggaaggaaaaaaaaaaacttaatgttactgctatatttggcagcatgaacctgggagagcagagcctaaaaatgagtcagactaaagtctcttgcaacagtcagctttattcagggcatcagacaatttatgtctggaggctaagcaggattagtccagtggagtccaagtcgtatacagtcacaaaggcaaagtcacataagtttaggctgcaaacagtcatgagggtaggtcatatgggcttacacagccaggataactaatggtgggaaacatcattctgattaacgatgggtaagatgatgggtaatctgaagtgaaacccactcctgttattatccctaggaagagcacaaaaacacaatccaagaatcacccaagctatagagggagccattacaaaactctgtgtctgtgtttactgtggagatttctcacaaggtctcagaaatctcctcacatagctttattcatagactgggttctaacacccttaccttgtgt

SEQ ID NO: 2101 - DNA, 864 bp, Mus musculus
gaaaacaaaaccaaatctgtggggattactgcccataatacttagggaaatgacagtttgtcctgctgtctgctgaggtgtgagctctggaatgggcgtggatagggtaggtgggtattgagtccctaagctgattgacttgggtgttagtttatcagatgtatacctgcaggtgttaaggttcaaggccattgtgtgtaggcctttcctttgctccaggacacactgaggccgtgcctggtattattagatgtccttaggaaggcttcatgccactcatttggatagtctccaaattttgaatttctttttcctgtgagggcaaatttcctatttttcatcttccatctgtatggcaagtcttaactctttggctcgtcctctgagtttacctaaacctgccttttcgtaaacaagctttattttgagtctcactatttttggcaagctcaccccctttctctgttctgtgttacaattaggaaaacctctttaacgtttctccttttctcatcttcactaacctatttttattcaacacaggcccttgctccctctgtgtccttgtggattgctttacacgccaccttattgatgggtcatcttgccaggactccgggcaaggcttttctagtccagtcccagaactggatgttatagctgtccctcccactgtccttctaaagtgaaaagttggctttggattttttttaattggatattttctttatttacatttcagtgaaaagtctttacaatggttttaaaaacttgtggggttctgaaatatacctctttctaatttacaactagacaggtttgggaatgacctggcggcatctcatattctctaatcctccagcc

SEQ ID NO: 2102 - DNA, 838 bp, Mus musculus
tagatgtctggactctcttaatggaaacaaagatgacttcctcatctatgacagatgtggccgtcttgtgtatcaccttggtttgccttactccttcctcacattcccatatgttgaagaagccattaagatcgcttactgtgaggagaggtgcggaaactgcaatctcacgagtcttgaagatgaagacttctgtaaaactgtgacctcagctactgccaataaaactgcggagccctcagaggctcatagccaccacaaacaccacaacaaacatgggcaggagcatcttggcagcagtaagccttcagagaatcagcaaccaggccatcagagacgactctgcctccttcaggcttgcaccaccaccacaggcataggggccagcacaggcagggtcacttagagagctgagacaccacagcaagtgaaggcttgcacctttcacttgcccagaggaagctctgacgaagggggtgcatcaaccagctcctgtgtaagttgtctaaggagtccgaggcagcccccagcagctgctgctgtcactgccgccacctcatatttgagaagtcagggtctgcaattgcttgacagtgtgcggaaaacctcccatccttatgtagctgacaggggcttttcgcggaggagaaagtcactgaatcctgtcagtgtaggtcacctccagctgcctgataaaatcagccatgaaccccatggaagccaacccaatgaagctgagataatcagaccaggaagtgaaaatgacattcaaactaaattatttaaaacaaggcatactctccccaatcagtctaaagacccatttcttttgagaatg

SEQ ID NO: 2103 - DNA, 807 bp, Mus musculus
acgcggggcggcgcggctcgaggctcgagccgccgaaaaacacacccattatttaaaattattaaccactcattcattgacctacctgccccatccaacatttcatcatgatgaaactttgggtcccttctaggagtctgcctaatagtccaaatcattacaggtcttttcttagccatacactacacatcagatacaataacagccttttcatcagtaacacacatttgtcgagacgtaaattacgggtgactaatccgatatatacacgcaaacggagcctcaatattttttatttgcttattccttcatgtcggacgaggcttatattatggatcatatacatttatagaaacctgaaacattggagtacttctactgttcgcagtcatagccacagcatttataggctacgtccttccatgaggacaaatatcattctgaggtgccacagttattacaaacctcctatcagccatcccatatattggaacaaccctagtcgaatgaatttgagggggcttctcagtagacaaagccaccttgacccgattcttcgctttccacttcatcttaccatttattatcgcggccctagcaatcgttcacctcctcttcctccacgaaacaggatcaaacaatccaacaggattaaactcagatgcagatcaaattccatttcacccctactatacaatcaaagatatcctaggtatcctaatcatattcttaattctcataaccctagtattatttttcccagacatactaggagacccagacaagtacataccagctaatccacta

SEQ ID NO: 2104 - DNA, 734 bp, Mus musculus
ggtggcggcgcggctcgaggttgtagagtccagctgtgatgttaaagatcagtaaaggaatgtatagatttgaagattgtgtggaacacactttctgtgcttcctgggacaaaggcttttgtgtctggtttgaaatgccagctgatttgtctttgttcattttttctaatcttgattgattaggctataggaccctctcacttcctgtaggactagagagataccttgcctagctggggttgtgttgtttctgtttttctctttggtttcagtccagtgcatatttgagctgagctccaggggggtaactcctgacagtaacatggcgtgtccatcttctcttgtccctgattgaaaagcaactttgctttttaaagtatgtttaaagtaagcaaatattgaggtattttggtgactttctgaagcaagagtttgtactttgaaagcttgatttgtttttttgctttttttttttggtttggtttggtttttttaaattaatgtctggctggtgttaatgaaggggaaacacataattgaactgtttggcgtggtacaaatgtgtgactccgggctgctgtgtgtttagcaactgctgtgtatatgtgtgtatatatagggttctcagggctttgaattgaatggctgtggtcctccttgattccctttcatggcctagagaatattaatgctgaaaagctgtgattacgaaagaaatctcatgctcaaaattt

SEQ ID NO: 2105 - DNA, 719 bp, Mus musculus
tcttttaagagtgtgtagaaatagtttgctgctatttggcgcttacttaatgctgctctctatacatttttcttgtggacatgtacataagccatgcaaggacacacagatgtttggcaataacagaatgataatagtacctgtgttttgctctagtcttaggaacttaggttgtcgctcatcctttcaaacatgttgtaagtgcagtgccacttgtatttcactttgacttgtctctgcataggcacgtgattaccatggtgattgagaatgactgattcttccctttttcttgttgcctcttaaggcaagaactgtagaagagagtagaatagtgcttgctatggccttttattactgattcattaggttctatgcccttcaaacatatgtgaaaatacctgatgaaatgtggaagactacatgtgaacagtcctctcttctctcacctcttacggcctgttggccatctgagtggaagatggagggaaatgtacttaatgtctgtatatatgttcttactactgtattgctttagttctctgggtgatcacagtggaagatccccaatgtaccatggagttaagatgtacagcagtgccctctttccctttattgcctcggtacaatacttcttaaaagtattttgaatgtttgaaagttgggttgggtttctggtggtggtggtggttggtggtttgctaatatgacattagata

SEQ ID NO: 2106 - DNA, 762 bp, Mus musculus
cggcgcggctcgaaggtgccacagtgtgtgtgtgaaggtcaaaggactctcaagagtggatcctctaattccttcctcctttactggggttcggggatcaaatttgggacttgaggtttatgggatgttttacccattgaccatcttgctggcttgtttactgcctgtttgttttttgaaacatgatctcactatgtagccctggctgtcctggaactcgatacacagaccatactggcttcaaactcatgaagaccctctttgcctctgcctcaggagtgctaggaataaaggtgtgtacttgtttactgacttttaaataattgtgtatttgtttatttggagtagggtctcctgtatcccaagctggcctggaactcactatgtagcccaagataaacttctggtcttccagcctccactttccaagtccttgaggttacagatataacccactgtctgtgtctagcttgtgaagttactttgaaaaataattttatggagctgaatgatggcacacacttttgatccccacacttaggaaacagacacaggcagagagctcttgtgagttcgaggccagcttggtctgtgcagtgagttctaggccagtcagggctacagcgagaccttattttgattagagatcatcttaaaggactggggagatggaagtcctgagtcaaaagcgtcagcactctcgtaaaatgctgggtgctgtcttgagtctgtgcttccctcgctggggcagcggagaatgtg

SEQ ID NO: 2107 - DNA, 751 bp, Mus musculus
  misc_feature (670)..(670): n is a, c, g, or t
ccgcggtggcggcgcggctcggtgactggatggtacagcacagatttctctggagtcagttggtcccagaaagatccaaattatgagactgtcagcaagaattatttggcttatattatggactgtttgtgcagcagaagattgtaaaggtcctcctccaagagaaaattcagaaattctctcaggctcgtggtcagaacaactatatccagaaggcacccaggctacctacaaatgccgccctggataccgaacacttggcactattgtaaaagtatgcaagaatggaaaatgggtggcgtctaacccatccaggatatgtcggaaaaagccttgtgggcatcccggagacacaccctttgggtcctttaggctggcagttggatctcaatttgagtttggtgcaaaggttgtttatacctgtgatgatgggtatcaactattaggtgaaattgattaccgtgaatgtggtgcagatgggtggatcaatgatattccactatgtgaagttgtgaagtgtctacctgtgacagaactcgagaatggaagaattgtgagtggtgcagcagaaacagaccaggaatactattttggacaggtggtgcggtttgaatgcaattcaggcttcaagattgaaggaccataaggaaattcattgctcagaaaatgngctttggagcaatgaaaagccacgatgtgtggaaattctctgacaccaccgcgagtggaaaatggagatggtataaatgtg

SEQ ID NO: 2108 - DNA, 773 bp, Mus musculus
  misc_feature (631)..(631): n is a, c, g, or t
caccgcggtggcggcgcggctcgagctaaggcggattagcggctgcttccctgcctcgcgatccccccacctccagtgagccaatgcctgtgggcgaaggagtcgccccggtctctgccctggcagagactgagggtttggagcagcgtacccgtgccggccaaagtcgtgcactgaggggcctcgtccatctgctttctccgaagatgacttaaccagccaccggaagctttgcagatttaaaagactggtccagtagaggacatggtcgccgcacactcagccctcacggttcgtctccagcagaagcccctcgtaggctttggcggcgttgtacagtgaccaccacaagtccccactcggacctgagtctcctgctgaccctgagggcaggacttagagatatagcgaacagctctatgtggaggttcaactggatcatggaaggctcagcgggctccgtgtggcataggccttggctttgatctcattggatgtggggagcttgcagccaggatgctggggatgatccgtggtccgcaggctctgggaaagatgtaggcctggttaacgtttacaactaaggttgaacaaaagcaggctcaccggaaatgctcaatatgaatagatnaaccttcttccagacagggaaaggctcatttattcttggcttataaaccaggctcccctttgctatagctagtagcttcttttaaggagccccgtgtgtttggcacgtactttgggtttacagtggcacacctgccgattcc

SEQ ID NO: 2109 - DNA, 579 bp, Mus musculus
cacgcggtggcggcgcggtcgagactggatgctctgatgcatgtcccatcgccggaatccctccctgcctttgactaacattccagccttcctaggccctggcaacatccttgtttcagcaggaagtagttacagaagagagttcgtcgccccttttccccagctggctggaatgttagatcagaaggacattcactggcgtgggggacaaaatggctacctagactgcctattggcatcctaggaaaggtacctgttgaactcagagactcagatctatcaacaggtagattcattagctgaaatagttctacagagtgacggggcatgggatctgttttatgcagcagatggaggtgttgtgtgactttaagagaaaactattgtttgtatacaaagcactcagggatcatcagaggtaatctgaggacccgcaatgaagcaaatggctgtttcccagtctcatgctccttctagttagcaactcgctcggccatctcagggtctttgaccctgtatttctgctgattactattggctctggctcatcaattaatgccttaactggataataatttc

SEQ ID NO: 2110 - DNA, 537 bp, Mus musculus
  misc_feature (471)..(471): n is a, c, g, or t
gcaagaaggacctgtaccctagccagtgtgttccatgccactgccttcgagtgggacaccgagggcaacccctttgaccaagacatctacgggcgcgaggagctgcgcagccccaagctgttctatgccgaccaccccttcatcttcctggtgcgagataatcagagcggtccttgctcttcattggccgctggtccggcccaagggagacaagatgcgagatgagttgtagagtccaagagtgggcgtggcacggcaggaagtagccaaaggttcctgagacacatgggtgctatagtggggggagggggaggcaccaaccctggatattccacgggtggggggggttggcagtgcagatcggaattcccatatgtctgagtgggtatttttagacagaatccactcctaagttaggacatggagcccagatactatgataccaaattcaggggtgtcacagcgcatttngttctgcgcctgcaagttttagatccaatctgcctcaacagtcaatcagtgttcatatttatgggc

SEQ ID NO: 2111 - DNA, 590 bp, Mus musculus
gcggtggcggcgcggctcgagaaaatggctacctagactgcctattggcatactaggaaaggtacctgttgaactcagagacccagatctatcaacaggtagattcattagctgaaatagttctacagagtggcggggcatgggatctgttttatgcagcagatggaggtgttgtgtgactttaagagaaaactattgtttgtatacaaagcactcagggatcatcagaggtaatctgaggacctgcaatgaagcaaatggctgtttcccagtctcatgctccttctagttagcaactcgctcggccatctcagggtctttgaccctgtatttctgctgattactattggctctggctcatcaattaatgccttaactggataataatttctgcctggctaccattaagctggtggttattggattctgatgtaaacaggtacccatcacagagtcagggattcgactcaggatacaactcaaggggagaatgtgagagatagttatacttaaaattttaattatggtgccttaagagacccactaaacaaaaatgcctctattgtagaccatcttcctgaaaggccggg

SEQ ID NO: 2112 - DNA, 563 bp, Mus musculus
gcggtggcggcgcggctcgaggcggctcgagcatcaatcaaattctccttcattattagcctcttacccctattaatatttttccacaataatatagaatatataattacaacctggcactgagtcaccataaattcaatagaacttaaaataagcttcaaaactgactttttctctatcctgtttacatctgtagccctttttgtcacatgatcaattatacaattctcttcatgatatatacactcagacccaaacatcaatcgattcattaaatatcttacactattcctgattaccatgcttatcctcacctcagccaacaacatatttcaacttttcattggctgagaaggggtgggaattatatctttcctactaattggatgatggtacggacgaacagacgcaaatactgcagccctacaagcaatcctctataaccgcatcggagacatcggattcattttagctatagtttgattttccctaaacataaactcatgagaacttcaacagattatattctccaacaacaacgacaatctaattccacttatagg

SEQ ID NO: 2113 - DNA, 297 bp, Mus musculus
gcggggcggcgcggctcgagaatcgtagaaaaagtaaatgtgtctcaggatcactattactgctgttgccactagtgattcctaggaaatacataattgactttttccaacaaaatgtatattattacatgttagataataagaacaattgtcccgtgaatgattctatgaagctatgcatcttagacctcttgagctgtgaattagcactattttctatggttacttattatctattgttttatactttctatgttcatttcaaataatgttaatgttattcaatcattttctgaa

SEQ ID NO: 2114 - DNA, 618 bp, Mus musculus
accgcggtggcggcgcggctcgagtctaattgaaatgtgtcttgctgaagaccacagttaatattcatacttttgctagaagatgctttgtgtctttcgttatcacccttagtccttaggaccccagctcagaaggcccctgctgactgttaccctctagttccggactgggtcttgctgttctgatctttctgggttaatggaggcctatgggtttgattttcgaaaatgagagagttgccattatattgttatacttatttgtggtgtgaactcttaaggcgtttgacacatgttaggacagggtttctaccgttagaagcttttgtggcggtactgtatggtagcactgctgtaatgtgatggttcatatcttgtattgtctgaattagacatacagactagggaacaagctttactgatctgaaagagtttattgtttctagatatttgtcatttgaaagatacttaatcaagctacaagaagtcttttatagcgattgtcgtctattatgggttccgtagacatttcataaggcctgatttttagttattgtttaggaagtaatattttttacaatagtatagcttaggaatctgaagattcatttcaagtat

SEQ ID NO: 2115 - DNA, 887 bp, Mus musculus
  misc_feature (521)..(521): n is a, c, g, or t
taagagtcggaagatgatgattcagaggaggaatctgaggaagacagctcagaaaagcaatctcaagatggctctgacaaagaaatagaagaaaatggtgttaaaaaagatgttgaccaggatgtctctgacaaggagttcccagaagatgttgagaaagagtcagaagaaaatgagactgacaaatcagaatttgatgaaggttctgaaagagtgttagatgaggaaggctcggagagagaatttgaggaagactcagatgacaaggaggaagaaggtgatgatgatgaagaagaggtcgtatatgaaagggtttttgatgatgattctgatgacattgaggaggaagaagaagcagatgaaaaggagtgtgaagatgctgatgacaaagaggaagacaatgatatagatgaaaagctctttgatgactccgatgagaaggaagatgaagaagacacagatggaaagaaagatgatgatgccagtgacaaggtattcgaagacaattccaatgagaagtngtttgatgaggaagaaggtcccaatgagaagttgtttgatgattctgatgagagagggactgtggggaatgtgaaggaagatgggtctcagtccacagacagcagctttgccctcagtagtagtgatgatgatgatgatgaagtgtaatcttttcccgttgcttcttagggagagccctgcatctccattttgcccatgcttcagggtcaaatagtagtgttacagcaaccatgtgcataagtggtaaggatggcatctgacttaatgtctcgaaggggtttggtctcacctgtaaccagtggatttcacatatgtcattggttccttcagttcaaaacttcacagtaccatgcaagtaactggat

SEQ ID NO: 2116 - DNA, 793 bp, Mus musculus
ccgcggtggcggcgcggctcgaggagctttgctatctaacaggcatcatggattagatagctactggttggtcccttttgccagagagaagggaagtgacctccttttggtagggaggaactagtttcctttggacctatcattccagcctttagttaatgataagggacaaagtactctcttctataactgtgtgtcagttaaaaactgggactttgtggtcagggctcatgaaggctacaaagctggtcaaaggctgggagtgggcggggcgtctctggtgtgctgcccaggttttgctggactgtgtggagctagtgaggtgcaggtctgtttgaaaggagtaggtcggaatgctggcctacagtggaactcaagctggtaggacattttgttagaagctcctggtacgagtcagattttaacaaggtcagggactgcggccattgtggtgtagttgattggagatctgctgggacagatagagactttaggtggggaagcttaggctattgactgtcaggagttcttatctggagtctgtttgacaggtggatccaagtcgcaacttccctgaagcttacacgaaatgatttttaaagttaacagttttagatacattggcatcaccactgtttgtgatctgcactgaagtcctcattatagaaaaagcagttaaccagtgtctgcaaacagctggagttgacccacgtctttgagccattgcaaaagcttggggacccccaaagtgagtctgggttaaaagcatgaatgctctttcctctgtccctgg

SEQ ID NO: 2117 - DNA, 813 bp, Mus musculus
cgcggtggcggcgcggctcgaggtgttcctcagcggggccaacccgcccgcccggcttccatccggctccggcggcggctccttcccgccctcgtctatggtggcggcgggggacgcggctgcggcgtggcatgaacagtggcggcggcggtggcctcccgccgccctcggccgctgcctcgccgtcgtcgtcctcgctggcggcggccgtggcggtggcggtggcggcctcgtcgggcgtcgggggcgtcccggcgggccggcggcggcggcgggcgtgaagctcaagtactgccgctactacgccaaggacaagacgtgcttctacggcgaggagtgtcagttcctgcacgaggacccagccgccggcgcggccccggggcttggcctccatagcaacagcgtcccgctggcgctagcggccgcggccggggccgcctttcctccgggagcgctcccgggcgggggagcggggccgtccgcggggcccaagaagccggagctgggcgtccgggggcggcgaccgcgggcggcggactcgatggcccgcgggtggcgattccgggaatggatggaggtgctttaactgatgcgagtctcacagagtcctatttcagcaccagctttattggagtcaatggatttggaagccctgtagaaacaaagtatcccttgatgcagagaatgactagtagtagcagctccccaagccttctaaatgacagtgccaagccatacacaggccacgatcttctgacttcatctgcttcatccttgtttaatgacttcggtgcctcaaaatctccagagaag

SEQ ID NO: 2118 - DNA, 765 bp, Mus musculus
gtggcggcgcggctcgagtctggaatggatctgagacgtgggcactgagcagggaactgtttcccttttcttgccatcttggggagtctgcttgtgcacctcctcttccctcagtcagtggacatgtgctagtattctttggagtgttacctgtgtggggcaggagccttccagccttgggtcctctgccaggatccctcacttccagggacgagcctattctgaaggccgccactacctggtctttgacctccgtaaatcagcagtgtgagataattgcacaagacaagaaatcagcttccaatgacagcagtctttgtacatgagccattttctagtaggcagagtccagtttcggggttcacctctgggtgtgtagagagcctcacagctggagccttatgtacgatgccctaatctgccagttcccccagtcccaaccccctccaagcaaggacaggtgttaacatctcagtgaccatctgttctcggttgtggggacaacagccttcatgaggaagaacccccttcaggtgacttcccgttctgagctctcagccctcctgttctgctgaaataggtactgccttctctgggcaacggagtagagaagctagcaagagttctgtccttcggcttgtataggttatctgtggctgcgtaagaaaccacctgcaatggccgagggcttctctcggctggggattcaggagctgctgagcatggagactttagcataggctctcagaagatacaggtagtctg

SEQ ID NO: 2119 - DNA, 760 bp, Mus musculus
gtcgagggaacttatgctgcaaggaagaaggaggtaaggtgttgaccgtggtgaggaacatgcatgcagtctgaggaggattagtacagactgctctgagcttcccttggtagcattgtgggcacctgcacttggctttccttgtttcgcaggggttttcggaagcagtgtgatgatgagttcaagcacaggtgggattgtttgggcactgggtcactgttccccagatgcagtgtgttctgaaaatgaagagccctgagtgtcttggctcctcaacaggagctgcctgtaggatggagaactgtgcgtacttcttaggtcgaccgtgacgtctgttcaccatctgcctccagtgccctcagaaggggcagctctgtcttgctgacatttgtttgactttgttgaagggaggaaagtaactaatacctgacaaaatgcaagacagttcttacaagttacttaaaggtttttaatgttcatatttaaaaaaattctttatgctgattgcaacagctcaaagcaaagaaaatcttttaaaaatctcttgtgtatattttcagttctaataaaataccaggcactttcaattattttgaaagtttttactaggttcaaaacacattttgacacattctgctagtctgtatacaggagcaaaaggagcaaaaaggagcaaaaacatgtcctgacatgagcttgagacgtcatggttagcattattacactcgttgctgtcgtgaagaaaatgattttcctggga

SEQ ID NO: 2120 - DNA, 638 bp, Mus musculus
gggcggcgcggctcgagggaatttcatatgggagtcatgccttatacaacacatacaggaatttaatgtgtgagccatgccttcaaaacacatcttgaatttctggaatggccagaagacaacagggtttgcttatttaacctttcaaatcagtcattgtgacaaggggacagggtcttgcgcttgctatgagatcattgtgatgcttgtagaaacctcatgagtgctttgccactgaatacatccattgtgggtttggcttgaatggtgcttaaaaaccatccctgagcagaggggaagctgttaaactgtcagtcaaagcagtttgggaaataaaagagactgggccctgggtcatcttactagataacactttgtaaaaattggttctgaaaaccctgtttatttgcatatttgtgaaaaccctgtatatgtggcttgtttgtgagtgtgcttaaaagtggtgtgaccagggcaagatcgctcattggaacagctgtgtggaatggggaaatgtgaagaaagctgtaactgcaggttggtcgcacacgcttctctgtactaaagtgttcagtgtacaaacccactaaccattttcctcccctttacagcaaaataaaggtttgagattgaacaaa

SEQ ID NO: 2121 - DNA, 676 bp, Mus musculus
  misc_feature (614)..(614): n is a, c, g, or t
gcggggcggcgcggctcgagatgactgttggaaattggagaagagtgaacggataacaggattcgaaaccaaacacactggtggttatggcaggacattggatttcatcatagtccatatagtgaccgaggttgaataaccttgactttcaaatcctgttttggtagttggacttcattatcttggtgattctagtcattttacaatgttttgtatctggtcatttactgtaatcacattttttatatctgtacagtgacactttttgcagttgtggggtagtgtgtatcactgtgcatcttgcatcatcgaaactactaccatgatactatccatcgataatattaatattacttgaaaatagacaaaggtaaagaaaaggggtctatatgatgtgcagttttgtgcctttatgtacttgccttgttcttcgttgaatgtgtgaaattctgtactgtggattttcctagagtagagagtagagtcatgcattaaaataggctgtatccctgacacctttaaactactgagaataatgtggttgggccgtgtaaatcagtgttcaaagttctaatgacatgacatgtgctctgttttttaacatttcagtaccnacaacattaattaatactcctgtaatagataagaagtcattaattaagttccaaaagaaagg

SEQ ID NO: 2122 - DNA, 551 bp, Mus musculus
aaatatcagcaaagactactgctcttaatggtcacagccctcgtgtttaaagtggcgtccccctcccaagcattaagagtgcgctgaactatcacagattttacttagttctagtagttataatcattagcattctccttcaggagaaaatctaaatgctggaaagtctaattgcagagatagacaagccaagctttatgtgcaagactttatattgtaaactgtttctagcagtgttacagtgattgtccaaactggattagactttgcggttgaaatcaaagtatgggtaagtctagcacatgtaataaaaccttgctatttcttgtggctacattttttttttaacttgtctgtcatcttaggctaccgatgtagaggtcatttcgtgtgagttaagatgggatggcctaaaagattcagtgtgtagttactgaagaagtaagtcccggagcctcagagcagtctgtctcacagccccgcttccattgggaaacctgccattctggaaggaagcacttggtgtgcttggaatgttcatgtgggaatga

SEQ ID NO: 2123 - DNA, 863 bp, Mus musculus
  misc_feature (97)..(97): n is a, c, g, or t
gcggcgcggtcgaggaaaaaacacccattatttaaaattattaaccactcattcatgacctacctgccccatccaacatttcatcatgatgaaactntgggtcccttctaggagtctgcctaatagtccaaatcattacaggtcttttcttagccatacactacacatcagatacaataacagccttttcatcagtaacacacatttgtcgagacgtaaattacgggtgactaatccgatatatacacgcaaacggagcctcaatattttttatttgcttattccttcatgtcggacgaggcttatattatggatcatatacatttatagaaacctgaaacattggagtacttctactgttcgcagtcatagccacagcatttataggctacgtccttccatgaggacaaatatcattctgaggtgccacagttattacaaacctcctatcagccatcccatatattggaacaaccctagtcgaatgaatttgagggggcttctcagtagacaaagccaccttgacccgattcttcgctttccacttcatcttaccatttattatcgcggccctagcaatcgttcacctcctcttcctccacgaaacaggatcaaacaaccaacaggattaaactcagatgcagataaaattccatttcacccctactatacaatcaaagatatcctaggtatcctaatcatattcttaattctcataaccctagtattatttttcccagacatactaggagacccagacaactacataccaagctaatccactaaaaaacccacccatattaaaaccgaatgatatttcctatttgcatacgccattctacgctcaatccccaataaactag

SEQ ID NO: 2124 - DNA, 799 bp, Mus musculus
ggcggcgggtcgagctggagaagggctgcatcccctttcccttcagcctgttctcagagcacactgaggccgggtgctcagtcatcctggtaggatggagcagtctttacttctgaagggccagcggtccgtgtctgactgcttagggaagcagcttgctgttgctagagagtttgaaattccaactttgtgcctgacttgagtaaactggaagtcatacttgtaaataactgaacaagcagaagccgagtcagaagtcaaactgtccaggaacaccagtggctacagtggcttcctgtgatgcagtggaagagggaatcagtgcttgggggtcgggcatgcatgccccatgcccataacagtaatctgagaggatggcagcccctggggacctcgtccccaccctgggctgaacccttcctggtatgaggcaaagttctgctccatctccatccttgccccatgtcttggggatgagctgcccttctgaaccgtaaatacaggaataaagatggccagtacttgggctgacataagctcttgtctcaggttagcccaacgctggctcatatgagcctcctgaagcttctcctggccctgggcatctgatttccagttcctagggacagcatttgctgtgtctggggtgagccatagactcagattctgaaaacatccaattccatgtccagagcaccatagccacagggagtctggacgaggtgggcgcattcttgttcgtgaggggatcatggcctttacgatgctgtcactcaagttgtgaaagtccattttccct

SEQ ID NO: 2125 - DNA, 640 bp, Mus musculus
gtctgattatggtaataaaataaatttcaaatactcttaacattaggctaatatgttactaaacaaaaagccaatctgagtgtacagttgccagtctatgaataaccaaaggtttttctttttcctctgaataacaagcctacatgttccgggaaagtttaccttaccagctaagcatccccagctcggtatattttttaaaatctattgtactacttgatgaagaacttgacctaagtccagcctccttcttttgaagcctgtctgtctgtctttctggaggacagtatctagcatgtagaggctacttttccctttctgtcaccaccctcttctgtagtggcggcataagaacatggtcacagatatcattttgatttctccttatctagatacttaagaacctacaaatatgtaccaggaaccaaaatactgccatgtccgtatgcctctatagagcagccacatcgctaactcccagtgtagctggtgtgaactgtcatgattctacgatggtaacatgggaaccaacctggggtaggatgctgggatttgagagtaccgcattgcttaagatagaactttacacctgagcaaaggctgctgggagcgctgtgcttccacctctcagtgtcaggtg

SEQ ID NO: 2126 - DNA, 741 bp, Mus musculus
tagatcgcgactggaattttttttttttttttcaatgagggtgtctgaaaattaaaatcaagccggatatcatggtaaagttggacagtatgggtccttcatgtttgggccatatggtataatggagcttttaccaaagatgtaggagaagcaggaggctatacaaaaatgagctgtaagtaaaacatttaacctaaagcagatgagaaaaggtgctatgtggtaggctcctatgggtgcagagggattttggattcaagacgcaactaaagcctaagggcctcagtttcacattaatagaagcatctctaggaatgaggcggactcacttaagaacatttaagtggcttttacagttcccaaagctccaccggtaaagtgtaattctataggggtttaaatgattacattctaaggtcacataaatatggttatacaaatatcaaggctatagtaacatcctgaaacaaaataagcacaaaggtataaatgcctaaacgggaggaaacttgaaaccctcatgttggattcttaaatgtagtggtcctacttgtgacagacagatgggtagacagccattttttggggtcttaaaataatggggggcatagttaaaattttatacaagtgattggctggtactgaatgttgcaggtgaaatgggtaattttaagctaattggagatatctgaagaggtgggagggggggagacatattggaaatcggaaaaccctaaacct

SEQ ID NO: 2127 - DNA, 779 bp, Mus musculus
  misc_feature (188)..(188): n is a, c, g, or t
  misc_feature (511)..(511): n is a, c, g, or t
cgcggtggcggcgcggtcgagattaaataaactccataaagtaggatgtggagctcaaaccccacacccaggactatcatcatctctccatgcctacttcttttttgctgtacttcccttttctccatacaaagtcaataatgacagctcaacaccatttcccgacccagagatatcagaagatgctntggtgggtgttaaagtaccgtaattcctaaaatcaaaagtgctaagagcattaagaatctactttcagagagaaaacgaaaggtattaaggttcctcacactgatcccgactgaggttatattggttcaaagccaacgaaaccttaggaaacacgtaacaaagatatatagttgcatgtgtgtagttgaaatgtttatgacaaatataaacaatataaagaaaatacaataaaagttactccaatgtcatggtaaagagattattaaaactttatttttccataaaatatttttatgtccggttaaagcttattacaaaaatngtaatccaaccaggcatgatggcacaatcctttaatcccaacactagggaggcagaagcgggaggcagaattaatctctattaattcaaggccaatctggtctacatctcaaattacaggacagccagggctataatagagagatcctattttaaaacaaaacaaaattatgacccaaattatcgctgatccttatagtgtgctatgatgttgaatattagtttattgtatcttattgacaatgtatcttctattgctatcataaggt

SEQ ID NO: 2128 - DNA, 744 bp, Mus musculus
  misc_feature (553)..(553): n is a, c, g, or t
gtcgagccattatttaaaattattaaccactcattcattgacctacctgccccatccaacatttcatcatgatgaaacttgggtcccttctaggagtctgcctaatagtccaaatcattacaggtcttttcttaggccatacactacacatcagatacaataacagccttttcatcagtaacacacatttgtcgagacgtaaattacgggtgactaatccgatatatacacgcaaacggagcctcaatattttttatttgcttattccttcatgtcggacgaggcttatattatggatcatatacatttatagaaacctgaaacattggagtacttctactgttcgcagtcatagccacagcatttataggctacgtccttccatgaggacaaatatcattctgaggtgccacagttattacaaacctcctatcagccatcccatatattggaacaaccctagtcgaatgaatttgagggggcttctcagtagacaaagccaccttgacccgattcttcgctttccacttcatcttaccatttattatcgcgngcctagcaatcgttcacctcctcttcctccacgaaacaggatcaaacaacccaacaggattaaactcagatgcagataaaattccatttcaccccgtacgtatacaatcaaagatatcctaggtatcctaatcatattcttaattctcataacctagtattatttttcccagacatactaggagacccaga

SEQ ID NO: 2129 - DNA, 808 bp, Mus musculus
  misc_feature (266)..(266): n is a, c, g, or t
  misc_feature (704)..(704): n is a, c, g, or t
aggaggagcacaagatagagacgtggagagaggtgtacctgcaggactcctttaagccactgtctgcatctctccaaatgccagcttgttgatgctgtctcttcattaattcgaaataagatccacaggctcccagttatcgacccagagtcaggcaacaccttgtacatccttactcacaagcggatcctcaagttcctcaagttgtttatcaccgagttccccaagccggaattcatgtctaagtctctccaagagctgcagantggcacctatgccaatattgccatggtccgtactaccacgcctgtctacgtggctctgggcatctttgtacagcaccgagtctccgccttacctgtagtggatgagaaagggcgtgtggtggacatctactccaagtttgatgtgatcaatttggcagccgaaaagacctacaacaacctagatgtgtctgtgacaaaagccctgcagcatcggtcccactactttgagggtgttctcaaatgctacctgcatgagactctggaaaccatcatcaataggctggtggaggcagaggttcaccgtctggtggtggtggatgaacaagacgtggtcaagggcatcgtttcgctgtctgacatcttacaggctctggtgctcacgggtggagagaagaagccctgagcatggggaagaacaggcggtgcccggggaggtgngcccctcactgtctgtcctgctggaagctctgggaatcagatggaatcctgggagaactgaagtcttctctcaggagctccagcccactgtctagagctagaga

SEQ ID NO: 2130 - DNA, 671 bp, Mus musculus
  misc_feature (110)..(110): n is a, c, g, or t
  misc_feature (141)..(141): n is a, c, g, or t
aggcagcagccatctttctgggctgggatgccatgtctcagtgaagtcttgttttacctttgggagatgactcgtgctgtccggtatccttagcaactgtatgtcttctntggagaaactctcagcctagtcttttcgttntgttttgatttgattttaaatccaattattggggctacaattccttatatatttaggatattgactgctcatcaggtttatagcttgtaagtactgcctttccgtctgtggctgtcttcacgctctgttcattgtttccatctatgtttgggaaccgaagccaggtctcctgtgtgttagattagttctctagagtgttacctgctcccggtgattagttcttataattggtcctcagtaaatacacacgagcccttccctcgtggcacatttagaaggttctcctgtggcttttatgaatggtgtgagaattgccccttttgcctctctgctgttcccaggagataaggcgtgattgtaggtaagatgctgtagcagccttctttgctcatttacaatggacagaattgagttgctcacagccctagaggccagaaagggcaatatccaggtattgtcggagcgggtgtctcagaggggctgctcgtctcctgtccagcctaggacgctacaccgtgcagcggggagag

SEQ ID NO: 2131 - DNA, 845 bp, Mus musculus
  misc_feature (277)..(277): n is a, c, g, or t
cgcggggcggccgggctcgaggttgaaaatgacattcaaactaaattatttaaaacaaggcatacctctccccaactcagtctaaagacacaatttcattttgagaatgtttacagcccatttaattaatcagtgaactaaaagtcatagaaactggatttgtgcaaatgtagagaaatctaccatatggcttccaaaatttaaaaattttatgccacagaacatttcatccaaatcagattgtacaatagggcacctgaaaagtgactgcagcctntggttaatatgtctttctttttcctttttccagtgttctagttacattaatgagaacagaaacataaactatgacctaggggtttctgttggatagcttgtaattaagaacggagaaagaacaacaaagacatattttccagttttttttttctttacttaaactctgaaaacaacagaaacttggtcttcctactcttacattctaaaccgatgaaatctttaacagattacactttaaatatctactcatcattttctctctcagagtcctagcttgagttgcactgcatgtatctgtgcatctgtgttctcttcatttaatgctgtactgttctgctgagctctgagggactatcttgagagatgtaatggaaggaaagcgtggtgttaatctgcgtactgttaagacagtatttccataatcaatgatggttccatagagaaacctaagtcctatgaacctgacctcttttatggctaatacgactaagcaagaatggagtaccgaattcaagtggctacagtacacacttatcaaaataaatgcaattttaagactccaaaaa

SEQ ID NO: 2132 - DNA, 621 bp, Mus musculus
tcacgcggggcggcgggtcgagctcgagccggccgcggtcgaggcggctcgagagagtatataacttctgatattttcttagctgtgtgatataaccagttacctgaccacttttaccctgttctttctccatcccccaaatcctgctaagtttcgatggctgttgcttggggtacccctgaaatcattgattaaattgttggcgagaatgtacccaactaatactttatactgtagtctgtaaatgcacttaagctagaaatagacttttaaaaaaaatcaaagatttctgttttaaatgggaatacctgctatcctaagtctgttgactttctggtgagaaataaaagtccttgaacaccagaaatgttaatatttagtttcagttcaacatacaccatcactgtccttatagggttgttatcagatgttcaaactattcttcatttttgactgtgagtgtgtgtgtgtgtatgtgagtgtgtgtgtgttttcatagagaagcaaagagcagtgtggcatgaactaacatctccacgaaaaaatgaaaaatgtgatactatagtatttactaatgtgtgtgtttcttagctttgatcctgggtcctgagaatctcaaga

SEQ ID NO: 2133 - DNA, 578 bp, Mus musculus
aaatgtatatctgagagaagatatcatgctaatgagctcatctgcctcatttacttttcatctgagttggccattgttcagtatgatttgacactgtccatttatatttatatgatgcacataaagttgtattcagtataaccaaaactggtgttattaaagataaacttcagtgtcaggaggtagctgaaggcaaagctggagtggagaggttacacacaagcacgtgagaatagaatgagagagacttctttcacaggacttgtgttagtttatgtctgcctttttttctttgtgtgtgtgtgtgtatacacgtgtgtgtgtctatctgtctgtctgtctgtctgtctgtctgtctgtctgtctgtctgtctgcctgcagacaccagaagagggcagtagatccctggagctgaagtttaggaagctatgagttgcttaacatgggtattgggaactggactccagtctgctggaaaattagcaaatactcaacaacccaacaactgaaccctgtatctgctttaaaacacacatgcgcgcgcacacacacacacacacacacacacacacacaca

SEQ ID NO: 2134 - DNA, 292 bp, Mus musculus
ccggtggcggcgcggctcgagtattcaacatccccctaaataaattaaaaaaactattaaacctaaaaacgatccaccaaaccctaaaaccattaaacaaccaacaaacccactaacaattaaacctaaacctccataaataggtgaaggctttaatgctaacccaagacaaccaaccaaaaataatgaacttaaaacaaaaatataattattcattatttctacacagcattcaactgcgaccaatgacatgaaaaatcatcgttgtaattcaactacagaaacacaaaaa

SEQ ID NO: 2135 - DNA, 863 bp, Mus musculus
tcaccgcggggcggcgcggctcgaggtataaactgtccatcccatcaattacaaatgaacatatcttgtaaaggaggtctgtgcctgttgaaaagataaccagtgccaaacacaaaactccttagttcctgtccctcaaggagatagaaactgcagtgaatctaggtcaagactcattggagaatttagtattggtactactacatcagagagatgtgtgattggcacctcctgtcacatttgcagccactattcggtgcagtcacagggaggaaaaagaccatagaagtcattgtgctgcttaaaacccaacttaaggatattttttgaatctttcaaattgttcaccaagtatttgtgcttgctattcctatgatgaagtgacctttaacatagtgcattgttagtttcaatacattcgacaaatgtagtcaccctgagtacagatgccaagcccaccaagactgagagaactacttccctgtgctcatcaacctgtggctctgttcaagagtggatccagttatccccagtgttgaattttgttttctttttaaattaaaccagataagacaatttaagatttccttgagtggaaaaatacagacttccaatctagattaagccctaaatcaacagccttcatgtttttttttcattgtggatttcatgggaatccttaaggatcctgagccatgacttacttctgttttattgtcttgggagagcagatacctttgaaaactagtaatgcaaaaaaatgagagagcagtaactatccttttctaactccagtcatgtgaccgcatgcaatttctttatatttctcaaagataacaccctgttaatttaaacacaaaaac

SEQ ID NO: 2136 - DNA, 806 bp, Mus musculus
ggtggcggcgcggctcgagcttgtaataacagtgatgaccaggatgtggaactttcagtacgttcaggattcaagtttgggggtgagagaggatagcggggagctctcagcagattggtcccacaagttgccagttccaggagatggaattgtggtgttattggaggaatgacagctatcttcccccaaggtgcagagttcaggtagaaacaaacagaaagcaagcatggcgcctgctgcattatgagtgtggatgggtagggtgggtttgtttatgcctatctatgggtgtttaaaccttcattaacttcaacattgaggtcccactaccctaggaggcacttcgcctccctgcctcgtcacatctgtagagtgcttcagggtggtgctggtccctggagccttagctgaagtcctccctcctcaccaacctcacctcacctgtctgttcagcagagccagatcataagtcccaaactgccttttttgttttagctgtgtgtggttgcatagtcatctgcagagtcttcacggcacagaggtctccatgcacagagtggatgtcctgagaccctcacttatcgtggggcaatggccctcacatgctagaagaccacaccgagtaaggctaggggagatggctcagctcttctctgatactcttgggtctgagttcactgaggtcctgccatgaaatctcccttacctgcggctcccttgcctaaggcagagccgtttccttcaggtaccacacaagcaatttgcagacctgactcagaaagtcctcttggttttgcaggtgaact

SEQ ID NO: 2137 - DNA, 755 bp, Mus musculus
gtggcggcgcggctcgagcttattctccagttgatggatgagaaactgaggcacaacaggaatggctgagatgtccaagggtacagaagtaagtgggtagagtgggaatacatatcctccgggctctgcagcctgtattgtaggcacacccctgttccctattcctgtctgcacattcccggtctcttactcagtttgttctgagggccctgcgggggtaaataaaagaacgtcccctagcacacagtgtgactatagtagagaagattttagatcagaaccttcctggaaagtcaccgatggatggccattctggacaaacattgaaccagagatctccctaaacttggcactttcattcataggtttgcccagagcctctaagattttcaaaacctttcttacttcccattacaatttagtcccagttagttttcctcaatttacatatttccttttccctaacagacctgctctaatctgtgaaagggcatgtgagaccctcacctgagtaaagctacttcttaactgcagaggccactcttacaggtagacaggtcccttccaggcctcacttaacagcactgcctcggaatgttttaaatagtctcataaataatttggcttacagtattgttagtttgagttttatgtgaggagctgtctaacatcagagcaatgaaatccctccctgtctgcatagaaaggtctctgacagtattgattcatggatgcactaatggactttgaaaaca

SEQ ID NO: 2138 - DNA, 734 bp, Mus musculus
gcgcgtgtgtgtgtgtgtgtatgtgtgtgtgtatgtatgtgggcatgcatgcatatatgagggcttaggtgcacgatttttctttctcaaggatcatggcaggatcccagaactcttatccaagtgagatccaggtctctgaatatctttttgtaaataataattaaaagctcctcaccaaattcaagcttgtatattatattttctttcaatgtttttaaatttaagttttattgttttgtatgtaaatatgtggacccaggaactgttattaatgagcaaaaagttactgttcagggcagtgattctgttcaataaccagacaaaaatgtagacgagctttttaaagccatatagttttaactctgtacagtaggtaccggcctgtattattgtaacaataactctagcaatgtatagtgtatctatatagtttggagtgccttcgcttccatgtttttgggttttttgtttgttttgttttctgacttcctttatccatgtgtccctgtggccccctttccctctgagtaacagcagaacagcacctttgcccactccacagtttgaatggggagaggaaaccatgttggcagtctcacttcattctagccttgcctttgttttggttctgggtgtgtctgtgtcctcagtaacagtgaccggtttcattgcggatgcactcagtccgtccgggacttggtggagcgctgggggccccagagctgaagggt

SEQ ID NO: 2139 - DNA, 821 bp, Mus musculus
gggtggcggcgggctcgagttctatgaaaaaacctacacatcttttctattgacttaaaaatcctcttcaccgaggagtgggattggtctcaacagggtcctcacgttcttcatgatggaggtgttgggtgggacatctgtgtagactatgatgttaataggctaaaactactcctgacaatctaagctcatctgcatgagtatgcgcacaactccaggagagctgaagactgaggagtaagccttctgtgggcctcaatggaaaacctgtgatttcaacttggtgagacagcaggattgaaagtcccctgtaacagctttcagcaagacaagcaatcacacagcagaatattatagaaccatctcacagaaccttgatctggtttgtttttttttttttctttcttgaccacagtgtggagcaaagaaaaagatttctttcttccttcctttctttcttttcagtttttccctttggtgcccttgagactagtatgctgaacatttatttggagcccacgtggccttgatagattctctggaaccccaggaatagctggatgggcagactccttgattccatttccttctgtgtggggtttctttcacccatgcatcgactcattttacaactgcggtgttgtaaagtagttgagcctaccttaagattaagatttcttacccatacataagtggtctgtcctggccaaccttggtgatgactgggagtttagaaaagaacaaaggcgaagctccaagtgactccataatttaagaaactgggttcaggcagatttctgattctatgtcttgggtaaata

SEQ ID NO: 2140 - DNA, 828 bp, Mus musculus
gcaagcaaaccattgttattagttgttctgtaaaggaaattgtggaatccaattggcactggagtcctaaatccatttaccaagtgtggcttccgagaaatgttgtaattcaaaatgtatcaagcccgtgaatttgttggggatttggagattctaaataatatttaaaaagatgtcatctctaggcaacttcgggggtctcacttttggaaattcaacttaaaaataaagtagaaagtaaaaataaaaataccacaacagcccaaccaagtgttaagcttaaagtatttttttcttagtaactgattcaaacatgtagcgtttgccacaggtcagactggttcatttcctagctagaagctcccggctttacttgttcaacaggacatcgacagaagggtttgtctcagtgttgagctcacacagctttgccctctggtgcatgactccttgggtcctgtatttcactgtgtcggtgtgtctgatggaagtttcaaggtggtcccacgaaatatattttatgtagtgtgccttcaaagagaaccatttatctctcttctcgtgttgtcccactaagtcacatttggtggtggccagccaagtcccgtgtggtctagtctgacttattatcccgggctgagaaaggaacgggaatggttttgccccagtgagaccacaccgtggagcaggtactttgagcatctccgctccggtgttgactgttgatgtattcgatattctggttatctcccaatggcggaaagaactctgagaaaaaaatagacaggtaatctcttggctggttatactttttaaaccttccctgtg

SEQ ID NO: 2141 - DNA, 684 bp, Mus musculus
cctcgtctgctagcagatcccaggggctgggatatcactttttaattggtactaaatctctagggtgatatggataaagcgacatgatgcagttttcttggtgtgcaacacataagggcagtgggcagcagtggtagcctccctcttgtctgtcagagttggaagcccgtgttcctatcacaccatttccaaaatcaaccgtgagccagatcctgtgagcaaggcaggggggctgtagaagccaagatactcttcctgcaggaaacgtggtagtgaccttggctcagacttctgtgctctagggacccactcggtgagaaatatcacactgcgcattaagtactctgaagagcagagcaggcctcgtacaccttcgaagtacttagagaaaactccatctctgcctgcaggtgttgtttggttttgctgggtttgtttttgtttttggtgagtagtgtgtttttattttttggagggggggaatttctgtttatttcatttggtagagctggacaatggagtccaggcctctcaaatgctaggcaaaactctgtcacgggtgcttcatcttggctccccttacagccctggctgtaggctgtcataaaatttagaactagagaaatatgaacagttggatacataaggattggaaatggccgaggaagggattttcctgagaaa

SEQ ID NO: 2142 - DNA, 815 bp, Mus musculus
  misc_feature (621)..(621): n is a, c, g, or t
  misc_feature (757)..(757): n is a, c, g, or t
gcggtggcggcgcggctcgaggtgaggcgtcacacccacagtccccctcctgagccgcacacagagtttccagctcatcgtccaaggagcaccagagttaaaaccgaatgagataatgcccaaatcagggaatagctggacagaaggcgatgaagtcatgctgacctgctccgcccggggcttcccagagcccaaactcacctggagtcagcgaggcgatactccagcagagccgccctttgagggtagaggctggaagagcagctcgctgatggtgaaagtgaccagcgccctgagccgagagggcgtgtcctgtgaagcgtctaacatccatggcaagaaaggccatgtcttccactttggctctgtggcccctcagactgcccaggctggagtggctgtcatggctgtagctgtcagcgtcggtcttttgctactcgtggtcgctgctttctattgcatgagacgcaaagggcgccctggctgctgccggcgagcagagaaaggggcgccgccagccagggaaccggagttgagccactctgggtcagagcggccagaacacacgggccttctcatgggtgggccctccggaggaggcagaggtggcagtggaggctntggagatgagtgttgaggctgacgacctcccagaggcaatctctggatctggaacttagggcatcatcggaggaccggctctgagcacgcctccgcctcagcgcacgcctctgcctccttccttctccagcctcgngcctcccttccttcctctgcctgctgggcagggacccacagtggccagcggctgggga

SEQ ID NO: 2143 - DNA, 721 bp, Mus musculus
gctcgaggttagtggggcctcgggctgcgaccacctcgctgagtagtttgcactagggcgccgggctccgtagaccatggctccgtcccaggcgcccagccgggaccgtgcaggccaggaggatgaggaccgctgggaagcacggggggaccgcaaggcccggaagcccctggtggagaagaagcgacgcgcacggatcaacgagagtcttcaggagctgcggctgctgctggccggtaccgaggtgcaggccaagctagagaacgccgaggttctggagctgaccgtgaggcgcgtgcagggcgcgctgcgaggccgggcgcgcgagcgggagcagctgcaggctgaagcaagcgagcgcttcgctgctggctacatccagtgcatgcatgaggtgcacacgttcgtgtccacgtgccaagccatcgatgccactgtctcagctgaactcctgaaccacctgctagaatccatgccgctgcgtgagggtagcagctttcaggatctgctgggggactccctagctgggctgcctggaggctctgggaggagcagctggcctccaggagggtccccagaatccccattgtccagtcccccaggtcccggggacgacctgtgttctgacctagaggagatcccagaggctgaactaaaccgggtgcctgctgaggggccggatttggtgtctacatccttaggcagcctgactgcagctcgc

SEQ ID NO: 2144 - DNA, 692 bp, Mus musculus
  misc_feature (306)..(306): n is a, c, g, or t
acgcggtggcggcgggctcgagaagtaacagattttaattaattagtaattctagtcacactaataaagaataggaaactgctacccccaggagcaaatgacaccttctaataagtgttctcagtaggtaggtttcaatactacactgaataagtgggtaaagagcccttggaatcccattgtgataaagggacttcccttagcactggaatgttcttagagcctctggatttcagacaaacactgaatttccctgaacttaaccttgagcagaataaccttcattttcacaagaaagtaaggcantgtaacccaaggtggaaaacttaaactttaagacaatactgtgtcagaaaaatgtgtatttagaagagtgaaaccctgtggagtctgttgtcctagtgtatattatattatatagtagataaggtggcttttttttttttattttttattgaagactcattctggttcttcattgggtttggggtttggtcttttaatgctacattatgtagacagagctcacaagtcttgggctcccatattaggtgtgtacactcagagtcatcttataactggaaactgtcaggtggtcccagctccagtgaacacaggaaaagtcaaggaaaggatgcaagactgggtgaatagcgctctggggtaggcttgtttggtcctccttttaaaaa

SEQ ID NO: 2145 - DNA, 727 bp, Mus musculus
cgcggggcggcgcggctcgaggttttggagacaggtttgcagtgtagcctagacaagcccccagctcaggatcttcctgcttcagcttcccaagtgctgcttgtcacagatgtgcaccatcttgcccagctctgctaggaagctgttctatagatggtcataggtgtttttcaggatataagactaacacacaagtttacacacctttgttgtcctgatagtgtctatagctcagcgcgttccctgattcttgtgctgcttacgggagtgattgttttaaacatgctgtttttgtgcctttcagagagtcatagtcatggtagctgtgttgctggagttcatgggaacctcactaaaggatggccggagtgctagactggtagcagtcatgataatgccaagaaaaagtggtggctcttttgaaggctcagtgtgctttgtgaactgagttcttagtgtttagtggcaaggcaggcccgcttttgcttgccttacaaggtcatttcatctctgttgtacaaaacacggctgctcctgctctacctctctgttaaagcaaagcaagtcacattcttgaagactggaatgcttacttttttgtttgtttcttactgagaaccttgtataagcagctactactgccaccttcagctcctgatgatctgtgagcgggttctagccattctttaagatccttggtcagactcccttcccttcgctctgtcag

SEQ ID NO: 2146 - DNA, 767 bp, Mus musculus
acgcggggcggcgcggctcgagggaggcagagtgcattggaaccctggagttggagctacaggcagtggtaagcccttgaatgtgggtgctgggaaccaaatgtgggtcttctgagacatctgcagcccacataacatcacttgaaaacatgaatacagaaacaggattgtactgagtgtgtgtgtgcacatgtctgtgagtgtgtgctagacagagtctctcacttgcctagaactcatggagtagggtaggcctcagatacccacctgtttctgtcttcccggtggttaggttgcaatcatacacctccacacttgtctttgttgctgtgttgttttgaaaccatggactcgggagttgacgaatctccccggtccttattcagagtttctgaaaaggcatttaccgtgcttcatcccttctggctttgagctgtatgagctctccccttacctttaattcttatgtatccctgctttccttacgcatgatgctggtgctcacatgacgaagaatagcagatgctcatctccttcagttactagacaataaaaacgatgaaaaccgaaggaagaagcaaaaataaatttatttctttactgaaagaagaggagaatgtcctcttggaggagtgcggttagccccggtgttaggagcagctacctgtgtcaagagcctttccatgtgctgctttgagagtgttggaaccggcgcccattccctgctctacagaaatggatctcgaatgtgcctagaaggatctggg

SEQ ID NO: 2147 - DNA, 648 bp, Mus musculus
tggcggcgggtcgaggatccacaggctcccagttatcgacccagagtcaggcaacacctgtacatccttactcacaagcggatcctcaagttcctcaagttgtttatcaccgagttccccaagccggaattcatgtctaagtctctccaagagctgcagatggcacctatgccaatattgccatggtccgtactaccacgcctgtctacgtggctctgggcatctttgtacagcaccgagtctccgccttacctgtagtggatgagaaagggcgtgtggtggacatctactccaagtttgatgtgatcaatttggcagccgaaaagacctacaacaacctagatgtgtctgtgacaaaagccctgcagcatcggtcccactactttgagggtgttctcaaatgctacctgcatgagactctggaaaccatcatcaataggctggtggaggcagaggttcaccgtctggtggtggtggatgaacacgacgtggtcaagggcatcgtttcgctgtctgacatcttacaggctctggtgctcacgggtggagagaagaagccctgagcatggggaagaacaggcggtgcctggggaggtggcccctcactgcctgcctgctggaagctctgggaatcagatggaatcctgg

SEQ ID NO: 2148 - DNA, 504 bp, Mus musculus
  misc_feature (272)..(273): n is a, c, g, or t
cggcgcggctcgaggcttcctgggcagaaagacccggcgagtctatgacctgttgctttgcaagctcagcttccccagccagctgcactgcttgcttttttgactttgtccctctcgaagggaacataggacaaataaataaaagtgcatatgtgcgtttttttacttttctggaatgcagcctttgctctctccgagatgccagccacggctagtgcgattgtatctaaatttcctgaggggtgttttttgattaagtcaggtaatgtcannaacacccctttaactacagctagaaaataaaaccattttataaagccacccttgcatcccctgcgagcctcacacagagcatctctccaaatccaggtatgccagccaccttgaataaaatctcttccgcttccgacgtatgaaaagcaaaaatgaaaagagggaaggttcccagttactcttttgtcttcagacatttagtaatataaagtacctatttttatgctgaaa

SEQ ID NO: 2149 - DNA, 593 bp, Mus musculus
gtcgagaaaaacacacccattatttaaaattattaaccactcattcattgacctacctgccccatccaacatttcatcatgatgaaactttgggtcccttctaggagtctgcctaatagtccaaatcattacaggtcttttcttagccatacactacacatcagatacaataacagccttttcatcagtaacacacatttgtcgagacgtaaattacgggtgactaatccgatatatacacgcaaacggagcctcaatattttttatttgcttattccttcatgtcggacgaggcttatattatggatcatatacatttatagaaacctgaaacattggagtacttctactgttcgcagtcatagccacagcatttataggctacgtccttccatgaggacaaatatcattctgaggtgccacagttattacaaacctcctatcagccatcccatatattggaacaaccctagtcgaatgaatttgagggggcttctcagtagacaaagccaccttgacccgattcttcgctttccacttcatcttaccatttattatcgcggccctagcaatcgttcacctcctcttcctcc

SEQ ID NO: 2150 - DNA, 175 bp, Mus musculus
cctgagccgtcacacagagttgccagctcatcgtccaagagcaccagagttaaaacctgaatgagataatgcccaaatcagggaatatctggacataaggcgatgaagtcatgctgacctgctccggccggggcttcccagagcccaaactcaccgtggagtcagcgaggcggat

SEQ ID NO: 2151 - DNA, 405 bp, Mus musculus
cgagggaaacttgaagaaaaaaaaaagaaagaaaatgagagtgaaggaaaaacacaaggtgaggatgctgcagagagcctcctgctcagcagagcctttgagctgaagaacgagaggtggtgattatgagaaaccagttatgtggaaaagcagcacttcggtagtcttagaacaattgtctttttattatatgtgatctgttttcttatcctctgtttgtttacctccccattcactaaagtcgcctcaaaactcagttctaaacggatcttgacaaacatgaacgtacttcccttctggttagcagaactctggggtgcagggtcctttgtgggggttcagggttccttaggttgtgttgagaaacctcagtgtaggccaaaccaaaatggatggttctgggtt

SEQ ID NO: 2152 - DNA, 470 bp, Mus musculus
cgcggtggcggcgcggtcgagggctaaagctgagtcagagccgctcaccacctggcattagggttagggcaagttctgggaatgtggcagactgtcaaaggacaaagctatatacatcaagccaccacaaatgcaatgcatggtgtggtgtggcctgatgcctttcccccatcagtgtgccacaccttacctcgccctagtgcaaaagttgacaggtccaaatacaaagtatttcaaaatttgctctttatttacacgtttgggtcgattacatgcatgttttatttttaaacaagtgattagcaaaaaatgcattaaagttttaaaatagcaattaaatatacaaaaatatagcttacaaaaaccaatgtttaaaaatattctgctgcagaattcttagtgtacaaacacgtctatgaaacctgaggctcagcatttcataaaccttttttgagggagttatatctagt

SEQ ID NO: 2153 - DNA, 678 bp, Mus musculus
aaaacacagatacccttacaagcaagagagcttattgacaccgttttagtcaagggaaatgctgcagccaacatcttcaaaaactctctgaaggaaattgactccacgttatatgaaaacttattgtggaaaagaatatgaagtatattccaacagaagacgtttcaggcttgtcattggaagagcagttgcggagattacaagaagaacgaacttgcaaagtgtgtatggacagagaggtttctattgtgttcattccgtgtggtcatctagtagtctgccaggaatgtgccccttctctaaggaagtgccccatctgcagggggacaatcaaggggactgtgcgcacatttctctcatgagtgaagaatggtctgaaagtattgttggacatcagaagctgtcagaacaaagaatgaactactgatttcagctcttcagcaggacattctactctctttcaagattagtaatcttgctttatgaagggtagcattgtatatttaagcttagtctgttgcaagggaaggtctatgctgttgagctacaggactgtgtctgttccagagcaggagttgggatgcttgctgtatgtccttcaggacttcttggatttggaatttgtgaaagctttggattcaggtgatgtggagctcagaaatcctgaaaccagtggct

SEQ ID NO: 2154 - DNA, 790 bp, Mus musculus
gtggcggcgcggctcgaggtcggctcgagcccaaataatgtccctatcacacgccactttactgatgacacaatgaagccaaacaaaccaccgttcctcttaactattaccaattcagaatggactggacacagaaatgtaagattttttttttctcgtttaatgaaaaagtctgtgaattcttttgggctgtacacttagctgttggctagtagtattgtactgtcagtgggctggagctgccgcatacagagtcccaggtcttggctatcatgcacagttggcatcaggtgttggcaaactgcacaccccagcacagaaatgggagctgaaatgaggttgtgctgggttgtgcacagtaaactgtatgtagagagtgtctgtagtaggcagcaggggaagctgctgatacaggacttacttgttttgaagaaaggaaagaaggagacaaacaacaaacctcagtgcagtgtacaaataaacatttggttcaactacctcttaaagtggagttagctagtgtaatggtttccttatagtaatagtcaatagcaactgccaaatttacgttcccatgcctcttaaaaggtcttcatgattactttctatagctttgaggtccttccttgtggctacttttttactcttgcatttgcataagatattaccctctaagtggaaggcaaatgacagccgtatatttggatattggtgaccgtgtttaattatagcagtttttttaatggcacttggggtataaaaactatgggtaactgtgatctataagatt

SEQ ID NO: 2155 - DNA, 572 bp, Mus musculus
cgcggtggcggcgcggctcgaggtctgactccagctggggcagaactgggccaggatcttccttaggcccagagaggagctgaggcagtgagatggctgactgctatacagagctggagaaggcagttgttgtcctggtggaaaacttttataaatatgtatccaagcacagcctggtcaaaaacaagatcagcaagtccagcttccgaaagatgctccagagagagttgaaccacatgctgacggacacagggaaccgaaaggcagctgacaagctcatccagaacctggatgccaaccacgacgggcgcatctgctttgacgaatactggaccatgattggtggaatcaccagccccatggccaacctcatccgccaacaggagtgccagcaggagagccagcaggagtgccagcaggagagccagcaggagagccagcaggagagccagcagggcagcagctacgaggcccactcggtgggccccgttttcatggtcctgtacccagtgtcctgccagtgttctttccatgctttaagttgactctttcttcctcccttctccctccag

SEQ ID NO: 2156 - DNA, 502 bp, Mus musculus
agtgacattgtgaggagttgctgcctctcaggagttgtatgcacaagcattcagcagtgctgctggatgccttctagggaaccttatttccgtttctcaaggcagggcctcggactgttctcgatctgctgtagaacttcactgtgggggtgccagaaccccacactcttgaccagtctggaagaggatacactcaataaaactctcagcttgagcttatgcaatgatggtaaagtttttggaaatgtaagaattaggaaatgatcctagaaatatatgtaaagtattcaattttcaatcatttttcaaattactgttttaaattgttttgctgagttgtaatacttttgagatacaatgtattccttgtactgaaagaatgaaaaggactttttcagcattgaggtaagttctttaacgtttcattaaaaaacattttttacaaatatttgtacatgcacttgcagtattgaggttaatcattttaataaattcggaaaaa

SEQ ID NO: 2157 - DNA, 601 bp, Mus musculus
gcggggcggcgcggtcgaggttggtaaaacagttttgaagacatggtattttgtatatagctagagatgtcacaacatcaactgtgaatatatttataggagatagaagggtaggatcaagcttggttatagagtgtttgcttaacatacgtgaaaccctgggtcagatctctagcactgcatcaaccaagcatggtagcaaacactggtaattccagcacaagggagctgaagtcaggaagaccaaggtcagctgcatagcaaactggaggctggtctgagaccctgtctcaaaacaagtaaaatattcagctgatacttgaatttctcccccctccacccaagtcacctagttttttttttaaattttattttataagctgaggagttaactgattgggcaattcataatagcattgtatgtagggacactccaaatgatggtaacatattttttggagacctttagcttgggtgagaacagaccttgctttcaagccttactcaatgtaccacgcctttgactacataccaagtcaagtgttttctacttatccttgagccagctgtaaatgcatttcctggtcttgatgggtattga

SEQ ID NO: 2158 - DNA, 466 bp, Mus musculus
agtgctagggaggtgaggaaatttggatccctggagctagcctggcctacttgatgagctccaggttagcctgtctttctttcacacacctaaggtggatggcatctgagggacaacatttgaggttgtcctctggcctacaccctctctctccctctccctccctccccccctctctcacgcacacatacatacacacacacacacacacacacacacacacaatatacaacacatatcccccaccccacaaaaaactgatcaggtttataaagaccagctcttatcttgtctggagaaattgttatatgggcacacatgtacatattggtgcgtgttcctgcttccataacaacatcagatatatacattcagtgagtgggtgtggcagatgtgtgtggtcctgtatcgcacaaggtaagagcgcaagtggctaccctcatcattgtatctgcatctgtgatga

SEQ ID NO: 2159 - DNA, 108 bp, Mus musculus
gggtggcggcgggctcgagtctaggcgcgggcccgggtggagccgccgcaggtgcagatcttggtggtagtagcaaatattcaaacgagaactttgaaggccgaaaaa

SEQ ID NO: 2160 - DNA, 829 bp, Mus musculus
atactattatataaatcaaaacatttatcctactaaaagtatggagaaagaaattcgtacatctaggagctatagaactagtaccgcaagggaaagatgaaagactaattaaaagtaagaacaagcaaagattaaacctgtacctttgcataatgaactaactagaaaacttctaactaaaagaattacagctagaaaccccgaaaccaaacgagctacctaaaaacaattttatgaatcaactcgtctatgtggcaaaatagtgagaagatttttaggtagaggtgaaaagcctaacgagcttggtgatagctggttacccaaaaaatgaatttaagttcaattttaaacttgctaaaaaaacaacaaaatcaaaaagtaagtttagattatagccaaaagagggacagctcttctggaacggaaaaaaacctttaatagtgaataattaacaaaacagcttttaaccatgtaggcctaaaagcagccaccaataaagaaagcgttcaagctcaacataaaatttcaattaattccataatttacaccaacttcctaaacttaaaattgggttaatctataactttatagatgcaacactgttagtatgagtaacaagaattccaattctccaggcatacgcgtattaacaactcggataaccattgttagttaatcagactataggcaataatcacactataaataatccacctataacttctctgttaacccaaaccggaatgcctaaaggaaagatccaaaaagattaaaaggaactcggaaacaagaaccccggcctgtttaccaaaaaaatcactctagcatt

SEQ ID NO: 2161 - DNA, 672 bp, Mus musculus
gggtggcggcgcggtcgaggcttgcaggtgtgagaaatttcccctttaatactgtttttattctagtgtgtcttattgttttgttcagttgctagcaaaatgataattttagccccaattgtcttctttttcaaagcagaatcatatgtgtgtatacctgctgcttctccggggagatgtatgatgtgccaatacccagagacaactggcagtgcttacaacgtggtctaatttctatggccgtttccatggaatgcagttattacgttaaagccatgtattacgaagctttgataaatttttaactcttcatattatgataaattccaatctagcattcaaataatttttgtactcctatatgtaaaatgagctatacaaatatttagaaaaatattgagtgaaggaagtgaattccttaagaatttcttttacagtctaaaattacaagtaccataaaactgacatgttttaaaaatagtaaattggtatttttattgtaaaactcttagttacgtctttgcttaaaattttattgtgtttcctctcactacaaatcttttaaaatctgaatatttggataatgtaagtctctctctctctctctctctctctctctctctctctctctctctctcaagtagtgaataaaagcagagtgttctgtgtgta

SEQ ID NO: 2162 - DNA, 773 bp, Mus musculus
ggcgcggtcgagccgggctgcgacccacctcgctgagtagttgcactagggcgccgggctccgtagaccatggctccgtcccaggcgcccagccgggaccgtgcaggccaggaggatgaggaccgctgggaagcacggggggaccgcaaggcccggaagcccctggtggagaagaagcgacgcgcacggatcaacgagagtcttcaggagctgcggctgctgctggccggtaccgaggtgcaggccaagctagagaacgccgaggttctggagctgaccgtgaggcgcgtgcagggcgcgctgcgaggccgggcgcgcgagcgggagcagctgcaggctgaagcaagcgagcgcttcgctgctggctacatccagtgcatgcatgaggtgcacacgttcgtgtccacgtgccaagccatcgatgccactgtctcagctgaactcctgaaccacctgctagaatccatgccgctgcgtgagggtagcagctttcaggatctgctgggggactccctagctgggctgcctggaggctctgggaggagcagctggcctccaggagggtccccagaatccccattgtccagtcccccaggtcccggggacgactgtgttctgacctagaggagatcccagaggctgaactaaaccgggtgcctgctgaggggccggattggtgtctacatccttaggcagctgactgagctcgcgggctcagagtgtgtggaggccttggtgaccaacacttaccagggacctgtgaatggtggtgc

SEQ ID NO: 2163 - DNA, 721 bp, Mus musculus
aggaacatgtcatggtgtcctgcagtgtgggtctctggtgggattgtttatggtagcacccaagtatcttcccccaatttttcctttatgttattactaaaattccactaatggttaaatattcaatgatctttctgtctagcaactgttgataactttaggtttctgattgttttaattatagcagtttggggggtgaatagggccttcgattaatgtcaattgaatttgggtttctagttttttgaagaaaaccctcccaaatacacttttcctttatacttggaaaaacttcattaatagttccacttaactctcaaagtattatcctggttgattttgaaatttgaaaataggttaccattttgaggcaattagataaaaattatgtaaatacagacaattacaatgtttataaatagtgtaacatgaatgtactagctacattcaatgctgcagatttttggaagtgtgacatggtatttttttatgttccttttacctctttttttttccaaatacttccccagatccaaaattctccacaacaatttctatgacataacacccatttgtcttaagtgcttcagtcttttgtttatttcatgcactgtgccttcaaaatgaaaacttaaaagggactttaaaagaatcgaatagtagttttaaaaagttatctgtgtaatttatgtgaaatctaactgtactgaggtcctttgtt

SEQ ID NO: 2164 - DNA, 861 bp, Mus musculus
cacgcggggggcgggctcgagccagcacaaagaaaataagtaacattcctagctgcttctgtaaactgtgacagatgcagttcctccttgatgtggctctgtttcttcatcataactactactaaattcaagcactggtccttgggtgtctgacctctacattctatttatgcaagtcttcagagaatctgtgcactggccactgtgatggaaccattgggccacaagtgcttgagtttatcagtagtgaatctgccaaagttggtatttttaacattgagtatgtaagatgtcaaaagtgagcagaggtctgggtctgcagacagcagaaagttttatctcagtgtattttacagcctctaagacctcagtgacaagtcccttccgatggtgacttgtcttttaaccacttgttttccacagtgctacctgtggttagcaaactgtgtgcatcatcctctgccttactgtttgatgtcttacatccaaaagaaacgctaaaacccatagcctttgaagacatggaaaatggcatttttcagatttctagaagttcagtgtcctgcaacaaaacaggaacccccttaactctatggacctcatttcaatatactgtttacagtttgacggaattgtataatttaatatttctcttgtactgtagtgaatatttatttacagattttttgtactgtgtgatttgaactttttgttcctgctataatcattgtttatgttagtagagcacttatgatcacacgtttaagttttgggttgattgcactacattaaatttttaagttcagttctgatttgactgggactaaaataagctgtcttaatgtatgtgatgagtactta

SEQ ID NO: 2165 - DNA, 788 bp, Mus musculus
aggcagtgggggtgtggaagatgactgggtggaagacgagggattcctgcctctggcatttgagggttggccatgtgggaccttcctgggaagggttggggttctggtgtgtctctaggcaatttgtctgttttcagattccccttcattttccgtccatggctttgcctgttactaaggtagtggctctttttctccagaaaacagaggcacagaatgacagtccatatcgatctgaccctggatggccactgtcatgagggtcagccacatctcaccagccacacagaacatcctatgagccacatttcttgatgtttcactggtctgcattttttttttctgacagaaccagaacaaactacagcattagaatcccagcaaaattattgtggagtcaaacatagctgtcagccctcagctccctttccctgttctaaaacaggccagactgtgtaaagactcagcaaagtttatgaaaaaggtgcatgctgcccataccccacagaccagtgcccgggaggctcatcttcctgcacgctaaccctgcctgcctgcagccatctgcttcagactgacgatgtggcatgtgactctggtcctggtgagggatgggcactggggggcccctccaggcgtcagaggccttcattttcagggggccggcgaggaagtgtgaaggaaaagctgaaggggatccctgtgggggtgggaggaagaaaagatggtctgccggatgggtctcagaggtaaccaggaaaagagacctcgcctcagcacctgcggtg

SEQ ID NO: 2166 - DNA, 564 bp, Mus musculus
tgtaagagctaaccatgccaggaaacctgcgctgggcgctccgttcattaccagaaattttttattaatctgattaataattattttccctatttaatttttttccttaggtggagtgccggaagctgggggcacctggggaggacggggtgggaggggagaggcagaagttgagagcacctctctctccctatacccgaccctctggcccccaaggggcaagaggttcgcgggtgtgggggctgagatccgagctgcagatgcctccacccctgcgcatttcccagattctccctcccgccccttccctgcaactctccttaattttatttggctttttaaaaaaaaatcaggacttttatttattttaaatttatataaagtatatgtgtgtgtgtgtggagctgagacaggctcggcaacggcacagaatgaggaaagacgagagagacacgagagtgggagagagagagaggcagagagagagagggagagagggagagtgacagcagcgcccggagaaagacatgctctcaaactgcagacaaaacaccttaggacata

SEQ ID NO: 2167 - DNA, 660 bp, Mus musculus
ggtctgaagtaggaggaaagagtgttctcagctccaagagaaagacctctccagaattcgtgtttaggcagtaacttaaattcctttccctcctccttcaaatggcctcttacttaaagcaacagccattagcaaggatgatgcatgcccgtgcactcaagactaataagcagtgttctctaacaccttgcacttggctctcttacaaggattcgatttctcacttttcatttgctgctgtgtctaagcatcctccttcaaggggagagagagcctttgagatctggtccctgtgatgttcttagagacagattatgctcctgtttggtgtgctcagattgaagcctggcttggaaccatccaggcgacgaattgtatgggctagaaattcccaatagataacaagctttgtgtatgaagtaaacacggcttagaaatccaggacagcccaggtctcagtgatttaaagctggtgttggctaaggtatactctgccttacaccgaaacaagaatttggttggaacgaattccatttctaagggatgcctaaaagaagttgtgtcctacttagcactgttagcttcattttccactttgccaagagaatcagtgtttcttgagtatgactttgaaatttgtgcaatatattactaaaatag

SEQ ID NO: 2168 - DNA, 770 bp, Mus musculus
aaaacacacccattatttaaaattattaaccactcattcattgacctacctgccccatccaacatttcatcatgatgaaactttgggtcccttctaggagtctgcctaatagtccaaatcattacaggtcttttcttagccatacactacacatcagatacaataacagccttttcatcagtaacacacatttgtcgagacgtaaattacgggtgactaatccgatatatacacgcaaacggagcctcaatattttttatttgcttattccttcatgtcggacgaggcttatattatggatcatatacatttatagaaacctgaaacattggagtacttctactgttcgcagtcatagccacagcatttataggctacgtccttccatgaggacaaatatcattctgaggtgccacagttattacaaacctcctatcagccatcccatatattggaacaaccctagtcgaatgaatttgagggggcttctcagtagacaaagccaccttgacccgattcttcgctttccacttcatcttaccatttattatcgcggccctagcaatcgttcacctcctcttcctccacgaaacaggatcaaacaacccaacaggattaaactcagatgcagataaaattccatttcacccctactatacaatcaaagatatcctaggtatcctaatcatattcttaattctcataaccctagtattatttttcccagacatactaggagacccagacaactacataccagctaatccact

SEQ ID NO: 2169 - DNA, 154 bp, Mus musculus
cggcgcggctcgatggctggtgcagtgcggtgggcgagttatgagacctgagctgcagactggaatgggaccccatcccacctgtcaaacagatggggctgtgctgtgtcattctgtcattgtaatataaatacagatttttataccccaaaaa

SEQ ID NO: 2170 - DNA, 772 bp, Mus musculus
ggcgggtcgagtgctcttgaatcagtatggaatgaaacacacttgaatatggtgagactttctctgactaggtaagaaatcagaatatcaaagctagttctgcttgaccctataaggtgtgtgagttacagtttttcccccagctgagttagaggagaatgacagaggctgagccatgttctgatgaaattcttggtcagtgatgactggtagctcagacaatgatatatagaaaggtatgaaaggcaggcactaggctggcatgtgtgcatgcctacaatagaaaaattagtagggggtttaagcaaagtttgaccaagttgtgtttgtgatccagtctgtgagacggacctgttaggaatacgctgacaaattagatgagataaacgtgaaaatatgtgcccagcaaacgaggaaaaatgtcaaatattaggtttggtgtaggtgggttggtcggtatactctcctcttagttacacaataggccttgacagttggacgcacgggacatgtgactttagatcccacggtacattggcgacagctgcaggtggagagcctaaggcgagcgacaggagactccatctcaagactgtcaggcatgattggggtcagtctgttacaaagacaagaagtccatttcgatgagggctccttaaacaggacgtgtctgattcgattggcttttacatgtcagtcacctgtttcttcccatacaccttgagagcacattttggtctcaatagacgattccagggttgcaaactcctcg

SEQ ID NO: 2171 - DNA, 624 bp, Mus musculus
caccgcggggcggcgcggctcgaggagcggcggcggcggagctcgcccccgcccctccctcctctcctccggcggcggcggcggcgggcggagtgagctgcggagcctggaatatggtcggggaaatggaaacgaaggagaagccgaagcccaccccagattatttgatgcagctgatgaacgacaagaagctcatgagcagcctgcccaacttctgcgggatcttcaaccacctcgagcggctgctggacgaagaaattagcagagtacggaaagacatgtacaatacactccttattgtttctgctgcactaattgccaggggtgggagaggaggagcagcaactaatccatggtaggcagatgtgggcaggaggtgctgtatgtagtgagtgggcaaagaggagctcaacattacttgaagtttgtatcccctggagagatactggccagcactgggacagtctcagaaccagggtaaaattaatttatatctctttaaaggttctattattacaaagttttgagccaaatatatctatataacctatgttatactggtatgtataaaatttgacttgtagaagttgtatatatagggatatacatatatatgtatgtgtg

SEQ ID NO: 2172 - DNA, 440 bp, Mus musculus
  misc_feature (274)..(274): n is a, c, g, or t
gcgggtcgagcacattgtcgagacgtaaattacgggtgactaatccgatatatacacgcaaacggagcctcaatattttttatttgcttattccttcatgtcggacgaggcttatattatggatcatatacatttatagaaacctgaaacatggagtacttctactgttcgcagtcatagccacagcatttataggctacgtccttccatgaggacaaatatcattctgaggtgccacagttattacaaacctcctatcagccatcccatatantggaacaaccctagtcgaatgaatttgagggggcttctcagtagacaaagccaccttgacccgattcttcgctttccacttcatcttaccatttattatcgcggccctagcaatcgttcacctcctcttcctccacgaaacaggatcaaacaacccaacaggatta

SEQ ID NO: 2173 - DNA, 792 bp, Mus musculus
gcggtggcggcgcggctcgaggctccatcctttggggctgaagagagagtcagtcagttccacttgtggtgcagacgctacagttgtgaatgtgtcctcaaaggcatagttaagatgcatttgtctaacagcacaaaccctgcagtcgcgtgagtgcttaggtaacaagcaggcctcgatagcctgacagcattgacatgttaaaccacacagagcacaccacacagcgttttctctgtcagggcttctatttagagtttctcctgaggctaaacatccacattaactcctgcccctatttttttcccatgaccagaagtgtagaatgtctacactttgggaaaggggaattacatgttcccttcagaccctttgctgtttgaaaaggcaagttttcatctgaaggaagggaaccaggtcctgttatacgggtagttggttaaagggtgtgggttctgtaaaaagcaagtccttgtgcccattgtgtgcctgaggtcagggagctgcacactccttctttggggagtagaaaatgaggatcagaacccaggcacgtgtgggtacccagttcccaatgacccgagcaagcactctttagtcctggtagcatttcgggtgactctcaggcaagaacttctggatctctgtgtatctgatgctggtcactgacagacttgccctttgtgtaacttctgtaacacctgtgggcattcccaaagaagatccatttatctaggtgatgtgattagagggacttgtgatccagtgtgcagagaaacactgtagcacttg

SEQ ID NO: 2174 - DNA, 572 bp, Mus musculus
cggcgcggctcgagctataatcataagttgaaagaaaaagaataccaactgactttcagacgagacccacaggaagcaacaagaataaaatccccaagtctaaaaggacgtggaaactttacatccaaatatgcaaaatgagccctgaaaaccttctgtttgttactgggtcagaggagaatagtgaaaagaatagctcacttaaggaataaacaataatcctgatgcctgaggcaaaactagtttaagaccaatcagaaggggtatataaaatcaaaacaaatgtttagaacaatccattcagcagaaaccctgaaaagataaattttaatgaatgcttctagaaacttccaatgactcataaagaaaaaaaaaaaaaaaggcctaccttaggacgggcaagaggtccacctcaacggcacaaaggagggtaatttttttaacccaaaggcagcttccgggcggggtagatctcgggtctggatggggctggtccataagagaactcccagttctttcccttcctggtgtgggctggaaggtctctctcagttatggttccttagagatca

SEQ ID NO: 2175 - DNA, 859 bp, Mus musculus
  misc_feature (671)..(671): n is a, c, g, or t
ctcgaggaacatctgggattacaagcttgcacaagcatccaaaatgctttctcctaaatgcttcgtaaatgaagcaatcagagaggaggctgtagccatccatagcttaggtaagagacgctgtgaggccaggctctgccggtgtctggtaaggaagcacttggattaacggcattcttcgtggtttaattcttgagaccaggtctcaggtagagtaaactagctttgtaagtattctatagctgaggctggccttgaactcctgaacctcttggttctacctcctcagtcatgggttttcagggctgtgccaccacacctgactcatctacagcctttaattttcttttctcaatgcagacactttcgtttgtaatattaaatgacaaatgaagctatcctgcaaaacaaaaggtttttgaatatggcttataaagagctcataacaggcactggtcaggtgtcttggctttttactcccatagaaagcctgcggctctgctaggacacaggctttcctgtggacacaggaggtacctggcttgctgggccttgaacagaacatgccccgtggttcagtcttctatgcccacacctggatggaaagaaccatcattggctacaggcagaggctggccggctctctccctggacttctcactctattaagngtgctgtgttctgccgactgacattcctgcggcactccgaggacatctgggtagtcgggaccatgaactctgtcagcaggtacagcaccggcactttggagtgaaagggcacaagtggccagacaacctctccctctccatccatgtaggtaggtggtctgtagagtcagtgggaaggcatctaggag

SEQ ID NO: 2176 - DNA, 747 bp, Mus musculus
  misc_feature (111)..(111): n is a, c, g, or t
agggaagcctggcactgcttaccacagcctggtgaactctgggtgtaaaccacagcccttctgagctcctaggccctgggttggttctggcatcccgagagctgctcaggnccacaggaactgctcgagtgggcgcagggcagacttgagcggactgtttgtctcgtgatgctgctactgctatagaagtgaggtacttgatctcgactttgttttttaggtgccaccccagagggtgtcccatctgagccaggcgaacatcaccgagtcttattttggagtctttaatctttactttgaaccacaggttgaactctgaggtgcctacagtgatgagtttctgactggcagttagcagacatcttttcaggatgcaaatcccactccctaagcacacgagctttcactttctttgccagagagctttccccagtgtcctgtagacaggtctcgggacctccatacctcctggttccccgggttaggcagaatcatgcttgaaagcgtctctccttcaggcgctgtggttattaagtacgtttacggactcctgtgtatcattaagtctcttggtagctgcagatgactggttccaggacctctccctcccttggataccaaaatggcggttgtataaaactacgcacactccagtgttgtttaaatcttctgaccttcatatgatacccactacaagtgtcatgtgaacagctggcatactgcttgttcattatgggagaaaaagcc

SEQ ID NO: 2177 - DNA, 833 bp, Mus musculus
gcggggcggcgcggtcgagggacaactcctcgagactctactgtactcaagctccacacatttgacatacaggctcagaactgagcatttgtttattgtaaataatgatttgcacgaaccctaaagcaccattttagtcagcttttatttgagtaatattttaacattttttaaaatatgcatcctggcattgtctgtctagtacaggtggtgccctatcccaccctgtggtgtccactgtgtctatagcacatgcttgcaggctggtcctcctgaaagccttttccagagcatccttagttttcaagtagtccaaaagtcataactctccacaacagcttcttattggcatgactctcatcacaccaactgcaaaatcaaaccaaataatgccttataaaccatgcagctcagagggagcagagtgtccccaggtcctggtgtggccacacagcttccagggagcgagatgccatgtcgtcgctccctttttagcagtacagggatgccagttttgcgtgcctaatgtatatatcccaatgcaaaggctagagtgggtgtggcccctcccatgccttccgcagggcccctttgtaactcaatccttttacgagtagccaatgctcttactgtttacagcatccctagtgcccagtctccacttccttctggccctccatgttcccagcgccatgctggtagccagggtaaagtcagctttatgagattttatatcctcccaacctgcagaccacaaatgtatatagctcatgatcgtgataagttattttttactcagtagtctcctctccaaatctaatcggagtgtaaga

SEQ ID NO: 2178 - DNA, 724 bp, Mus musculus
gtggcggcgcggctcgagaagccttcctgtccactgcaggcccattcagatgctggtctcctgtggacccacaaagtcaggtatgcttgaaagcctttgatggatgtcagaggcagaaggaccttttcaacagaaacaactgccagatctgtgggacccagcggttccatgaagtgctgaataccgccacttggaattgctggagaggctgttgtgtaggactcaatccctcgactgcttttgtgttagccattgaaactgaacaccgtcatttatgagcaaagagtcttatatttctttttaccctaaagtacaaaaagttttgaaagaaattattttttaaaaaatttaaagtaactatctttggtagtacatttggtgattatgatgttgcaatgtagcagatgcaacattattctccagtcaagatgtttaaattatgttttgttttgtcttccattaagtgcaagtgaatgtgttcatatgtaaaatatctcttgctgaatgtggacagtttacacacttaacacatattctttctaaaattactctgtacataataagccaggcatggttgtgcatgcctgtaattccagcagttgggaagtcggaggatcattcaaggccagcccgagatacatgagaatctgtgtcaaaaaagcaaagtgacaaacgttactctgtctaacaaaacatgatactctgaaagggtgtctttatttgc

SEQ ID NO: 2179 - DNA, 803 bp, Mus musculus
gcggtggcggcgcggtcgaggaatatctgggattacaacgcttgcacaatgcatccagaaagtgctttctcctaacatgcttcgtaaatgaagcaatcagagaggaggctgtagccatccatagcttaggtaagagacgcgtgtgaggccaggctctgccggtgtctggtaaggaagcacttggattaacggcgagttcttggtgcgtttaagttcttgagaccaggtctcaggtagagtaaactagctttgtaagtatgctatagctgaggctggccttgagctcctgaacctcttggttctacctcgctcagtattgggttttcagggctgtgccaccagaacctgactcatctacagcctttaattttctttgtctcaatgcagacacttgtcgtttgtcaagtatgaagatgagaaatgaagctatcctgcaaaacaaaaggttctggaatatggcttataaggagctcataacaggcactggtcaggtgtcttggctttgtactcccatagaaagccgtgcggctctgctaggacgacaggctttcctgtggacacgaggaggtacctggtttgctggccttgaacagaacatgccccgtggttcagtcttctatgtcccacacctggatggacaagaaccatcattgggctacaggcagaggctggccggttctctccctggacttctcaactctattaaggctgctgtgttcgtgaccagctgacattcctgcggcactccgaggacatctgggtagtcgggaccatgaactctgtcagcaggtacagcaccggca

SEQ ID NO: 2180 - DNA, 817 bp, Mus musculus
  misc_feature (541)..(541): n is a, c, g, or t
cagtttgggaactaaatagttcacatgaaaatctaaaggctgatggtaaatccctgcaggtggcactactttgagatgcagttgcttggaaaataccaaaatcctacaaggggaagagcaaaatgttttgcttcactgttgaatggggaagggtgacattgaaaagcttttcttagttgctcaatagatggttgtcactaccctgacctaggcaggccacaggggtggagcctggtggggggaagctgattgccaagaagtgaagctggggaggggcttgtaaacgcctcccgttgtgggctctgaaaccatagtatggggaggttggcagactcttctgggtctctattgaaattctgtcatactgtgtgattaagaattccaatgctgctatctaaaggaatttcatatgggagtcatgccttatacaacacatacaggaatttaatgtgtgagccatgccttcaaaacacatcttgaatttctggaatcggccagaagacaacagggtttgcttatttaacctttcaaatcagtcatngtgacaaggggacagggtcttgcgcttgctatgagatcattgtgatgcttgtagaaacctcatgagtgctttgccactgaatacatccattgtgggtttggcttgaatggtgcttaaaaaccatccctgagcagaggggaagctgttaaactgtcagtcaaagcagttgggaaataaaagagactgggccctgggtcatcttactagataacactttgtaaaaattggttctggaaaaccctgtttatttggcatatttgtgaaaaccctgtatat

SEQ ID NO: 2181 - DNA, 757 bp, Mus musculus
tcatatagggcgaatggagttcaccgcggtggcggcgcggctcgaggccctccaggaagcagacgtggccaagtgccggcgggactgggcctttcaggagcgggacaagattgtggcagagcgtgacagcatcaggaccctgtgtgacaacctgaggcgggagcgagatcgagctgtgagtgagctggctgaagcccttcgcagcctggatgacactcggaagcagaagaatgacgtcagccgggagctcaaggagctcaaggagcagatggaatgtcagctggagaaggaggcccgattccggcagctgatggcccacagttcgcacgactcagccatcgacacggattccatggagtgggagacagaagttgtggaatttgagagagagacggaggatattgacttgaaagcacttgggtttgacatggcagaaggcgtgaatgagccttgtttcccaggggattgcggcatatttgttactaaagtggataaaggaagcattgctgatggtcgcttaagggtcaacgactggctgctgagaatcaacgatgtagacctcatcaacaaggacaagaaacaggccatcaaggcactcctcaacggagagggagccatcaacatggttgtgaggcggaggaagtccctgggtgggaaggtcgtcacacctctgcatatcaacctcagtggacagaaagacagtggcatcagtttggagaatggagtgtatgctgccgcagtggtgcctggaagcccg

SEQ ID NO: 2182 - DNA, 192 bp, Mus musculus
ccgcggtggcggcgcggctcgagtcgcgactggagttttttttttttgtttctttaaaagaaataatctttaaggtaatggaggctccttaaaaggaaacagagcaattatgcctagaatctcagcaagcagacagaggcagaagataaatcccacagcgtgagttacatagtgagaccctaaaacaacaaa

SEQ ID NO: 2183 - DNA, 800 bp, Mus musculus
ggggcggcgggctcgagtataattaagcactgatgtataatttcaatctttataacacctgctttgaaagctttttaagttacgttgtctttaagtactctttttttgttgtggttttttgtttttgtattttgtttaaggtaaatggtagtagatggtttaatataagtaaagattatatatatgatacctttggaggtgtaaaatactgtgactggtttcagaatgagtaagtaggcagtaagcaatcttagcgtttgatgacactttatttttgctttctctttgtatgtccccctccactgaacaaaatggacctttataaaaagaagcagataactttatcatggacatagctgttactgtgcctgcagcacaagtgatgcttgggaaggcagcgagcagtgccgaggtggaatacatacatcctgctgtagctagagctcgcagagagcgggggtgcatcagtaatgtctgcactcttaacttagaatgaaacccaactatatactgttattttgtacctcaaacatttgatcgattttttttaacaaatgttttcgacttttcaaccaaagtctgttcataaagcatgagttttccttggagcaattttcttaggaattagaacaacttggaaaatgtgtacatagctaggaagaaagacttataaacatccaaaacctagtgctgtgtgtatcttgacacactacgttctgtgtgctagttttagactaagaagtgggtcctgggaaatggctattacaaaagctttcttctgaatatgaagacatggttag

SEQ ID NO: 2184 - DNA, 564 bp, Mus musculus
gcggggcggcgggctcgaggcggctcgagcttgggtttctgttaactggttaaagtgacagtatcttttttccttaagccatgtgttcatactttctgattagatgcggttgatatgaatgttgcatctaaaatcataagttgaaagaaaaagaataccaactgactttcagacgagacccacaggaagcaacaagaataaaatccccaagtctaaaaggacgtggaaactttacatccaaatatgcaaaatgagccctgaaaaccttctgtttgttactgggtcagaggagaatagtgaaaagaatagctcacttaaggaataaacaataatcctgatgcctgaggcaaaactagtttaagaccaatcagaaggggtatataaaatcaaaacaaatgtttagaacaatccattcagcagaaaccctgaaaagataaattttaatgaatgcttctagaaacttccaatgactcataaagaaaaaaaaaaaaaaaggcctaccttaggacgggcaagacggtccacctcaacagcacaaagagggtaaattttttaaccccaaag

SEQ ID NO: 2185 - DNA, 568 bp, Mus musculus
  misc_feature (504)..(504): n is a, c, g, or t
gcggtggcggcgcggtcgagctgcctggacacaaatgctaccatgatcaactccttcaacaagttcccttaccccacccaggctgagctctcctggctgacggcggcctccaaacacccagaggagcacatccgaatctggtttgccacccagcgtttaaagcacggtatcagctggtccccagaggaggtggaggaggcccggaagaagatgtttaacggcacgattcagtcagtacccccgactatcactgtgcttcctgctcagctgactcccacaaaagtgtcacagcccatcctccagacagccctaccatgccagatccttggccagcccagcctggtgctgactcaagtgacaagcgggtcaacaactgtctcctgctctcccatcacacttgcggtggctggggtgaccaatcatggccagaagagacctctggtgactcctcaagctgcccctgagccgaagcgtcacacattgcccaggtgccagaacctccanccaaggtggccaataccccgctcaccccagctagcgaccgcaagaagaccaagctacagatagc

SEQ ID NO: 2186 - DNA, 754 bp, Mus musculus
cagagctgcagaaagactctatcaagctggacgatgacagcgagaggaaagttgtgaagatgattctcaggttgctggaggataaaaatggcgaagtgcagaacttagctgtcaaatgccttggccctttggtgagtaaagtgaaagagtaccaagtggagacgatcgtggacaccctctgcaccaacatgctttctgacaaggagcagctgcgagacatttccagcatcggcctgaaaacagtaattggagaacttccgccagcttccagtggctctgcattagctgctaatgtatgtaaaaagattactggacgccttaccagtgcaatagcaaagcaggaagatgtttctgttcagctcgaagccttggatatcatggctgacatgttgagcaggcaaggaggactgcttgttaatttccacccttcaattctgacctgtctgcttccccagctgaccagccctagacttgcagtgaggaaaagaacaattattgctcttggccacctagttatgagctgcggaaatatagtttttgtagaccttattgaacatctgttgtcagagttgtccaaaaatgactccatgtcaacaacaaggacctacatacagtgtattgctgctattagtaggcaagctggccatagaataggtgaataccttgaaaagataattcctttggtggtaaaattttgtaatgtagatgatgatgaattaagagaatactgcattcaagcttttgaatcatttgt

SEQ ID NO: 2187 - DNA, 841 bp, Mus musculus
tgacattttgactttaaattttatctgtacaattacctaaaaagaataaattagaaatagaagaaaagagagaaacttagatgttccagtttctattcacagttactattctgggaatgttctactataagtgatactttatataatattgcttataatacttaacaggctgtatgcagacattgagtagcatccatcataaagttatagaatattcagctgaaactactgaatatggagacaaaataaaaattgaaagcctcagttatcagttatccagctggccatagccttctggaatctttgtaaatactctgcagataaggtcacaggtgtggagagaatgaggaacgtgcttgggtttctgcagtccactctgtccatgtgaatgtattgtcaatgttgatcctgctttaaaccttttcattctctctttgccagtatatttaagagaagcactgttctttgtaaaatcattctctttctttggctcctctctagaagtataatgtttttcaaacctagttacaaatcggactacaagatcgtcttaagaagaatatctatgattaagatttaagtggtggtctctactcggcttgtctacatgacagcagcagccacgggggtacagccttggtgagtgctggagtgtataggtctgggctttcctgggcagacttctgcattcttaaatcttacatggttagtctggtttccacttagatactagacttgcagcccagaaataaagcatccttagcatatctgcagtatgcacagaacactctatttccaattgactgaggttgccagaaatggcaaaatcttttccagaatc

SEQ ID NO: 2188 - DNA, 675 bp, Mus musculus
cgcggggcggcgggctcgaggaataacacatgactgagcgaacttcctagttaatcattgagattttcaagtcacccgattctttctcttgtgacaggctctccctctggtgccctggctggctcggaaggtactatgtaggtggaactgccctaaacctcttaaggaaccacctgcctccaccccctggggtgctagggttattgatgggttccacggtatcttgtttttcagtttatatatatgtttttagacatgctctgtggtcaggttgagaaagaacacagatgaagcaggtccatcagagatgtctttaggaagcttctctggtctctctttgggactattccgtaggaacacagtttcacttgctaaatcatgttgtacagcttgtgtctctgggttaggaaaggacaaggcacaccccacagatgtgttctctgcttcccagactctggggttcagagctcctaatgcaggctccatctggctctataaatagtcacagacacatcttcagcggcaacactagagtgtggcaatccattgtgaactcagctcctccctattgcaaaattctgacttcatcagagaacagcaggggtgaatcattccctgtacagaggttccaatgacatcatttactttttaagaaccagagggagagggagatgg

SEQ ID NO: 2189 - DNA, 543 bp, Mus musculus
cctctcatacgcctccccgcctcttacctttctctcgtgggtcacggagcctccccagcagtgaccccttggttgcctatctcgtgtatttctcctccttactctttttcttcctcaggtacatttgtactttgtgacctaaaaaatacatgcagttttggtgtttctgagtctggcttatttcccttagcgcaattattttgggtctctctcttcccgtgaagtgtcatgttttgctttatggctgcacacattccctcaggtgcttgtcccacactttcttcatgtgtgtgtatggatgagcatctaggccaatcccacttcttggctgctgtgactggtacaagatgtaatgcacatgtgcatgtacctctgtcaggggacttgtattcctttgggtctatgctcagaagttacagctgcggtacccacactttataagttatatgccatgttgtctttgaaagtagagatgaggcaaattcctatgtactgaaataacatgacagggccatgagttagttgtctttgtagtctttaaat

SEQ ID NO: 2190 - DNA, 650 bp, Mus musculus
acgcggggggcgggtcgaggcggtcgaggcaatgcaaagttttaagaattcttgtaaatcgtgaatccttgtgtaacttcttagggtgaaaaatgtttctagtcaagctgtatgggaacatcctgcttattttaaatgtcttatatatttaaagtatggtcagtattatccctttacacatacctgggcaaggtggtcccctcagccttaggatggatggcttcatggcacagccgatctcattcacagagagcccggtgtatgtccattcagatgtgtagatggggccagtgaagggtgatctagatggctgatgagccagcttcatggtgtagggtaacggacgattccctgtgccatgagaatttcactagaatgtcactaaacagccaactacctcatgtgaaattggtgtggacaatctgtgtttgatgagaaatgtgttcgcagaaatttattctgtttgataagttgaacagtgcagtgtctctatgaagaagaaacatgttataccagatgccaaaggtaaatagacatagatttctcagattcatttctatgttaatgtttattccagtctgtatcctcataaaggttgtagtttgtagagccacatgcttgggtatctgtcacaatcacctcttgtcccc

SEQ ID NO: 2191 - DNA, 541 bp, Mus musculus
  misc_feature (117)..(117): n is a, c, g, or t
gcggggcggcgcggctcgagatttgttttaaaggtctagaaaaaagacagtagaagaaaacagaggtaaaagaattaaaaaccaagctgtaaaataaacattctcatggtatacaantgtgctacctgaataaacttatgtgcataaattatttaaaagtgctatgaaacatatggtattttcctgtcatttgtttgggttggtgtggttttattcatttgatttccacatatttgcactttatttttcaaagctaagggcccttctagtcgtgatccaccccttccaggaggggagcacccctggacaaaatgtacctctgtttccctgtgtatctctttatgagtggcacgccatatgcgctttcatccagggcttttcttcccccatcaattaaaatgtccttgagatttaaaaataatcggaaatatatttttatatttattgtgcgtgtgtgtgtgtgtgtgtgtgtgtgtgtgagagagagagagagagagagagagagagagagagagagagaatatgggggtgtgtgagtgta

SEQ ID NO: 2192 - DNA, 651 bp, Mus musculus
ggtacaagtcagggctgggtttaaccatggagccggacctccatgggacagattctacgtgtcagctctcagaacatctggacgcacttccctgcagaggctgagcagccctccctggccttagcatggggggaagaaggagagcttcattcactgctgcatttggctccggagccttgtgtgacccgggagaagcacctgggcgcctgcattcgcctgcattcagccccagcactcacatgatcatcccggacaacgggccaccctggcccctggagagccagtccatctaaaccatgatttcgggtgctgacaatgaccttggctcagtgaataaaagtattcagtgactcctcagcagatggatggtgaaccaaacataatcaataataataagtaaagacataaacgtgactatctataattatgaaaactgaatgccatcataaaacaatcagagccttgattcgttaaaaacaaataacgtttctactgttcttaaagagggagaggggtgggtatgaaacccccgcgagattattaccctgaaactacacagaagttccggtccaaatgctggatacattgatcagggtatctgaggatggcactgtctggtgtcttcatgaagttgtctgtggaaaaagtcaa

SEQ ID NO: 2193 - DNA, 706 bp, Mus musculus
cgggaaccggtcgtgatgggtcctgccaccgtgatggttgaagctttgaggttgatgacgctgcagcatgtatagtgtggaagatctcctgatttctcatggatacaaaccagcccgagatgccgcagcaccatgtgaggacaaatcagagagatgcaggtcgacaaggacaggaccccgagctggccaaggcctattgaatgggtacaaggatggcgctacagcccatacgcacagtaggacatccctggggacaggacacgtgagcaactctgaaaaccgcatcagcaggccaagaggccacagggagcaccaaagcacttctagaactcctgaggcacggtttttaaatcaaccctccttagcatggtcctctcagccccaaagtggtagagacgacatctactggagcagaggaagacaggagggcagtggctccctgtgtcccaggactggaaagaactggaaagcagaggaatggtcaggcttacagtctgccgtccatgtgagagagaatctgtgggaagttgaggaaggacagagcatgtgatgaagaatgcatctgggaagaagagtgagaatgcaggaatgagcttggaaagtggaagaagcaagggagtagggaggcaggatcgatggggatggcggaaaggccaggaaagtcgagggtctgtacccattgtcatgggagcacacgtctcagaac

SEQ ID NO: 2194 - DNA, 546 bp, Mus musculus
ccataattttttatgcaggtggtaacattggcttgtcagcggtgggatactggggaagatcccttcctacaaaactggaattaaaaagtattttccctttcttccagagtttatattcagaaggccaatcaagttaagcaagccgggagaactcagtgaggagtatggatgcctgagaaaggtacctacatgttagcagggcgcttagtttcttacagttaatggaaatatgggcattcaagaaggcttatctttaattcttggggtctttaaaaaggtatgactcatagccggtctttcttcatactattttataacagtctagatagatttaaagctacactagaagtaaaggtagctaagaaccttggagcggctggtcgccaggtgaagtgtggcttaaggggctatcacacagtcaagaaagcgggtgttccatatctcagaaagccctggtaataattgcttggggtaactttccctcccagaattccagttactgagctgcggtattgtatgcttttacttaagtaagtactccaggag

SEQ ID NO: 2195 - DNA, 430 bp, Mus musculus
gggggggcgggtcgagcttggggagttagctctctaatcaatcccatagtgacatttgggaaaataagctgacactaactgagagaatgctatgtgctgtgtgcttgaatcttggtaaacacaaagccagaataagcacagtagagaaggatttattgcctgcagcagacaaataacacaggagtcatttccaaagtaaggctcttctcagacaaaagaagcttggggtttttttattcaggggtcctgaatccactcatataggggtgagcctgtcttagttactttccattgctgtgacaaaacatcatgaccaagactgtatgtgtatgtacacacacacacacacacaacacacacacacacacaacacacacacacacaataatagagagtctcacagcccagagtgtagaatctatgaacaaca

SEQ ID NO: 2196 - DNA, 649 bp, Mus musculus
cgcggggggcgcggccgagcatccccaagaaagatcttttgttatgatgtttgttttaacttcttgctttccaggtccttaccatgctggggcttggtttagatttctggtatgtttatctcatgttctcccaagtgccactagtctgacttgtgggaacaaaacagcatatgaagtagaggagagctgataatacatgctcacttatgcagatgaagatggcttgctgggggagggatgtgaagctgaatgttaggtaaaggaatccgtctagccaagattctcatctaggaggattgcggaaatctatcagttggcttcccacatctcatgtgggttttccttatcattctgagtgtgtgttgtgtgtctctgtgcatgcatacacaaggctgtttatcactctctgccttattccttttgttgttgtttcaagacagggtttttctatgtagccctcatctgtgggcttcaggtgggcctcaaattcacagagctcctccacccctgcctcctgagtgctggaattaaaggtatgtatcaccatgtcctgctgcagcgtctgattgctgaatcgctttggaacagtattctcagttcactgttcccatccctcctctccacaggagtatggtccccggtgacttga

SEQ ID NO: 2197 - DNA, 594 bp, Mus musculus
ggggcggcgggtcgaggaactgtgggccctcttctgttattgtgctgtaaatagagaggggacatctgtaaacagcccctggtcagctccctctggtggcagccggaattggatgtttaaggagtgtgtgtgtggagtccggcttgtgagcagtcatgtgggtcttggttgttcctcttttacaggtcctttcatttcagtctttgcccctgcttcctgtccttcaccagctctaagtgctgctgtgtgcaagtggggaacactgcacatgaggtccttcctcccagcgctgtagaggcccctgcagcctccctgtgtagcacaggcctacctgaggcctagcctactggtgctgcagccaacagagtgggtctatggtctatgtctactggttcccaagcatgagctgggcagaaaggagggcttaccttctagaccagaatcaccaggccctcctatgatcctgggagccttaggcagactaagtcaagagccaggacagctctggagtttccgtgtggggatatcgaggtgcgatgtgtgggtttaacttattagccagcaggcttccccagtcacctgcctctggctgcg

SEQ ID NO: 2198 - DNA, 600 bp, Mus musculus
tgctctcctcgctgcttggtttagctcagcctgtggttctgcccacgcaagggaaacagaccatggcggagtcatgccctgtggaatagtgctgagccaggcgtgggtttattttcttaaaagcatctgtaaaatgtgactttggatatctgtggtagatcaaactgaatattccctctcctttttaaagcctcctgatagaaaaccccgtgcctcatagagagcatgtagtggttggtttgagccttttaagaggctattagaaatcaaggaggaaaaattatatttaaagaagaattagagggagggaccttaggagggaatgcaggctgaatgcacttcgctcctcacttgagcctgtggtcacatctcctttcaaaaacgtgcttgccaggctcccctatgtgtcaggtagcaaagggggccatattttttatagagggtgaagattatattctcaagtttactgactgaagggacaataaggtcaggcttttgccttatttggattctgtgctaaacacatcacttaagagagttcctcaagtaacaactatgtcctttccatcccagaattctcaagctaatttgtacagacaa

SEQ ID NO: 2199 - DNA, 639 bp, Mus musculus
gcgcggtcgaggccatattcagaacttttcaaaggattcatacaggcatgtagaaaacaggccccaaagacagatatagttgctggttccactattgatcaagctgtgaacgccacctttgccgctctggtgtatcgcactccagacttatatgagaagctgcaaaaatatgttaacagcggtggcaagatagccctgactgaggagttctctcaggtgtattccctggcagatgggattcgaatatggatgttagagatgaagcagaagtccttgctgagcctggggaatgattcagaagaaaaacgtggtttggaagctgcagaggtgaacccagagagcctggcaaaagaatgtattcaaaaaagtctgttattactgaaatttttgcccatgagcaaaagttcaaaagaaaactgtgacaagttggaaactgtcgatgaaactgatcatctccagccacttgatagacgccagaggacaagctctgtggtggaagaacatttccagggttcagcatctcctacagaagcagccaccccagctgcaggtgacaggagtcctgccttagagatccagccaaagcttactacccagtagtggccctgtgttgcagaagtgtccacagctgaagagccc

SEQ ID NO: 2200 - DNA, 712 bp, Mus musculus
  misc_feature (649)..(649): n is a, c, g, or t
gcggtggcggcgcggctcgaggtggagcccggggaatgccgggcgtgggctgaggggatcccggcgccctccccagccctccgactttggcttagtcgcctggaccggaccggtgtcacctcggctcgggtcacctgtggcctcggggcctccgagctcgccggaccctcgcgaccgggagcctggcgagcgtggtgaggagatttttggggattttttttttttgcccccttccccggagcgcggaggccccgccccctcccaccgcccagatgtctccggtcaccgctcggaagaccttcctgaggccaggagccgaagggtccagagagagaagcccgccctagggagccttgggggccccccaactcgtcttgtggctcggcccgacactgcttagaggaaaggccactgcccccacccttgggggctgccctcctccaatccagttccctctccagtgctgttcacatctggagccccctccacatctggaagatcctgatcaccgtccctgtgctggttcagctgcatctagagacctctgcctttggtaactgcctaggagttgcgaggggattgctgccttcccccatcccaagggcatctcttacccttagtccttgcagaatcatccccctggctccgnatccagattcgggcaagatcagtctgtacaccataggcacttcaagtcctggaagctgtcttg

SEQ ID NO: 2201 - DNA, 706 bp, Mus musculus
agctttccttaggggtggagacaggaatggtgggacctgtgttgttccgtcccgcagaggtctctctttggagcccatgtataaggcttgacatttttctgtgagtagatttagaggcagttgttccaagtgaattctggcctcagtacaaagaatccagtggttctgacactcgggacaaaagctctggtatcccctgtagagaggctctgtcctgctttgctccagccactcacacatagttaataaagtggctgaagctcctcccttcccagagctgctgtgctggggacgctgtctgcagcccgcccgagtcccagagattggtgtgagcagtcagataaggctgatctgggagacggaggaggtggccatgacacaaggtgttgtcaggagaagatgattgtgacacaaggtgttgtcaggaggagatgactgtgacacaaggtgtcttcaagcagctcctttgtgagtaggctgcagagagccatcctgagtgggaggttgtgttgtttaaacacatggtgtcttctttgtctgcactggatggagcagggtttgtttctatgtgttctccaggtgagctcacaccctctttaagcaaaaggggtcttgtggatgttggaagcaaggtctgtcaaacattcttaaatggtgatgctagagaaaagcgagccccctgtaacttccctaaaagccgatcagc

SEQ ID NO: 2202 - DNA, 702 bp, Mus musculus
gcgggctcgataattcacttaataggacaatctccagtcgtgcctatttcttgcaaacaatgtacatttcattcttccttacagctaaatgaaattcattatataaaacatgccttctttacccatcctctctgttaaaggatgcccgtgtgtttctaacataaccagtgcaataaaaatggatgtgtaagtatcttactgatacactaactgtgagtcccttcaaaacatagctaggcgtggtatagctaggttgtatgtgtgaacaagaattcctagagagaagctgtgtttgcaatggctgatctgcagattagagcaccagtgacctggaggggctggaatgttgcagatccagagcctaattacaatgtatcctgggccaccactagccctctaagtagccattctttgcttgcctctgtatctaacccaacaccctgtgacaaataaaacccttttggaatgtatcaacttaacaaaagcctaatttctaccaatcaatgggctaagactgctgtccgacagcatccaaggcctatagcagagctctcccttccttgctataacctccctgctggtgtgccctggtgtgtacttgaacagggtcatgatttatggttcctttctatttacttcaaaaggtttctataaattgtacctcatggaacacagtattgggaaaacctaaaaactgtctcc

SEQ ID NO: 2203 - DNA, 749 bp, Mus musculus
cggcgcggtcgagaatttaattcatctttatcctcgagagaaacctcacattcactgttaggattccagcctgggctctggcagccccaacaaccaatgttctaccagttgtcctagaggccaattaaacacccaagtcatagcgaaaggcatccacccaagtccacctttggtcctgacatgaggtttaggtttaaatagaggtccagaagtgtgcatagctgagcagtcctggccagagtgtgctgccatatgtcgctatggactctggccatgtgtttatcgttgggctccagggtcctgctagttggtctgacaagttgttagaactgagtgaaacctctccctgggagacacattccactccctggctccaagcttcaacttttctcctcacaggagactcctgaagaaaacccagttccttggagattgccacttcagtagtctgatggaagggagggacatagagagcctgtttaaaacatctttctgccaggatgggtacaccctcagccatgactctttagctccttccaactgtgaccatgacctgagccccttgcaaacactgatctacttttggtctcttcaagcctgcctgtcacacttcatatgagtaaaatcatgggatagattatcttttgtgacttgctgctttggcctaccataatgtttctaaaccttgtagcttatgtcaagacttcatttcttattgcccaatagtctgctgtaggcatgagaccata

SEQ ID NO: 2204 - DNA, 607 bp, Mus musculus
gcggtggcggcgcggctcgagcccgagggtatatcaggaaagagctagaaagggctgactgaggattcaggctgtgggcttggctggcagatatgagcggcttccagagagctcacattgtatttacacgtgagctgaaggactcttgtaccactgtgctaacagcaacccgctgagactgtgcaaatgacttgctttaacggggtgagtaagagggaaacagtttggactgtggaataggggaagagttcactcaagtctcccagccaccctcagcaggtaagttctaggactctccaagtcccagggatcttttacagcctgtgcagaacttctgtcagtggacgtttggaggcatggttgtatagagcaagcatctacccttcacgtaatagtggcagggaaagaacactgctacatacactgcacacccgtcagcaccatgctgcagaagggatgctgatattttacattcttacatggctgtacatatgtagccaccagaaactgacttgctcgtgctttttaatggcttcaacttgcaaagggtgtgcttggcttgattaaaattaataaagagcaaggatggcagcttggatattaaaaa

SEQ ID NO: 2205 - DNA, 708 bp, Mus musculus
gacttgagtaggctggcaggaaaggactggggagggaccatttagttgtcccgtgtttttcagaaatttctcatttgcaatgatctgagacttgaaagaagttacaaaagaatcagcaccttaccttggttctgttttccacacactgaaaatatttcagtctattttcatctatttggaccattttcaaaactaaaccctaggcccggcttggctttcaccagttttcctacatgtattcagttgctcactggatacttttagcctttgtggtttgtaatctggcttggtggcatacaggataaaggattctacctagatattactctacaaatgagagaaaacatcaaactgacaagctcttttatcagggaccagtactccagctgtttgctgaacccactttcgattacagctcatcattgctggacccagaacggccacagcgttacacgggagtcatatgtaatgatcagctctgctgtttggccacccaaacaatccaaggacaacttaagaaaagtaacaatataaaaggttcaaagtggaagggaattgtaaacagaagaacgggacttttgttggtgaccagaggggtctatgataaagcggtactttggtcaacgaattaagtggtactgaatggaggtagggatagttgtgggtagactatggacaaatataaacccctaatgtgaggttaaacac

SEQ ID NO: 2206 - DNA, 664 bp, Mus musculus
accgcggtggcggcgcggctcgagctgtggctatgtaaacagacttttatgagaactatttcccggttttggaagaccacgtgtgttggaatgctggttagaggctagttaagctgcttacaggtaataggagccagcacagcaccccagtctggcagtagaacttggatgcttcatcagcatgtaaaatgctagttacagagtcatggaggcttacaccattgttagaagctctataaggtcaagttgcaaagtagtcttccaggctgttgggagttccagaattgtggaacacctaccaaggaaatctggaatagagtcatcccatgagagaggctgtatatatatactacacgtgacaaagttggaggggcggagctgttcatggtcactggatcccagatgatagtcccacaagccccagatgctgatcatggtatagtgctttccctcctaggtttagctgttgctttgatccagtcttcccttgctataccccattcctctccgttggaatggaaatgtttactctatatgcctttgtacattggaagtatgtaactggtcttctgaaattatagaaactcacggttaagaacttgctggcatctcagagcctttgggcttttgagcatgttgggacaattaaagactgtggtgactt

SEQ ID NO: 2207 - DNA, 600 bp, Mus musculus
  misc_feature (429)..(429): n is a, c, g, or t
cgggggggcgggccgaggtctccttacccattgaacagttcagccattcgaataaatgtacatttaaagcgtatagtagctgactgtattattgagtgtatgtatactatattaaatgtgaattgtacccttccattttaaaaggtcatgtgttctactgcctattttagattacttcggggatgggaaagggtgtttggtaagtagaatttaagtcctctctcttggatggttttatgaggatataaggttatactcttactaccaagctcaggattcttttaaaggtacaaggataggtgtgaggatttattttggttatatttgaactgtatgaatggtgggtctgaaaacagagtatttcacggtctagtgaggaggtaaactatgcggtagttgatcagtgtgagtgactgcagcgtgttctgngtgcacaacagttaggcatgctgtggttgtatctgtgaagtctggatgcctgagaagaatgagtaaatgcgtgtttctaatattttagggtttgtatccaggttatttattcttgtatctaaagttgaacagtactgtgctatattgactttatggtaggactgagcagac

SEQ ID NO: 2208 - DNA, 659 bp, Mus musculus
cggccgcggctcgaggcggctcgaggaacagtgataagcacaagggcagaggagagcactcatggaagagaagggaaatctgcatctcctgaagactgcatgtcagtggggaaacactcagacaccctcgacaaccaacactcttgggtccttgctgagttttaggatgtatttgctacagtttagaagcagagactaaggttggtaaacctggaccgtgagtcacctggcatgtagatcttagcatttaagaatggtgccgctgaagtggagaagcccaggaaagaacttggcatcttttatacaattcgagtgcaagggcctgctgtgtcttctgacaatttggtccaattcaaatcagtgtcttgtttccccagcactaacctgcgtatgaaataactttgattcttagaagtattataggagatagttaggaaaaattaatgcacattgaaaactgcataatctttaatcttaattttcatcaatatagaaactcaaagtcaaactacaaacaggcatattaatgggccatctttcctttcatttctggaagttgtctatctgtaattgctaatttttattcatttcatgaaaagtgtgtgtctaatacttttctaaaatactgatgtactggaaattcaaataaatggcaaaaa

SEQ ID NO: 2209 - DNA, 616 bp, Mus musculus
cggcgcggctcgagcctcaaagaaggcatgctgaccaaacagaacaactcgttccagcgatccaagaggaggtactttaagcttcgagggcgaacactttactatgctaaaactgcaaagtcgattatatttgatgaggtagacctgactgatgccagcgtagcagaatccagcaccaaaaatgtcaacaacagttttacggtcatcactccatgtaggaagctcatcttgtgtgccgacaacaggaaagaaatggaagattggattgcagcactcaagactgtccagaacaaagagcattttgagcctacccaatatagcatggaccatttctcagggatgcacaactggtatgcttgttcccatgcacggcaacctattgcaatgtgtgtcgtgaagtttgtcaggggtcacatcccatgggctatcctgtgaagtgtgtaagtttaaggctcacaaacgtggtgctgtgcgtgcaactagtaactgaagtggaccacatgggcctcaatcgggaaggatatcattgaggacgaggatgggattgcatgcctcaccagtggtggaaggaaacctgctgtgagtgccaagtgtatcgtgtgtgacaagacttgtg

SEQ ID NO: 2210 - DNA, 704 bp, Mus musculus
cgggtcgagtgtgttctcacacacctgctgacccaagggtcctccaaaccgagtcagccctggctctgctgttgccatgctggtgtccccaagccagaagatgttatcacttctaagttgccagaggagggtccccccagccaccacaccagagatgccctggcagccactctcagcattctttcaccacggctgtggcctgctgccctgctgagagcaacatggctgctgcagggacaagggcttctgtcccgtgggaagagacagcctttgatcttgcccagaccttgttagatagcacactcaggcttctggaactgaggctggaaggaggcagtggtggagggttgaaggtggggggtggggctagcctgcagcctgaaagggcagagggatatgggagaatgaggtagaaattgagagagaaaatccaagttccacctcctggctgggggtgtgtgcatgttgaggctcaggcagagaggaaggagcctgtccaggtgtcacacaggagtgacaagaacctgagctttgtcccagccaggccctatctgtagattcattccatgaggcttcccttctctctgctgtcctcagagactcagaagagggcccagacacagacacacaccaggggtgagagtcagaccaggggtggcacagacagcctgctgttatggagggttccttaggggcaggtgggg

SEQ ID NO: 2211 - DNA, 660 bp, Mus musculus
cgcggggcggcgcggctcgagggaaaaagcgtgtgttaaaagatctgacacccagatcttctcttggctagcggcagatagaattaggaggaactcctgctacataaacaaagtgcttgggctttccgctgagagttatgactgcatctgtctgtggcacttgaagctgacattgacagaatatagagaaaatgtgctcattactaccagtgtagtgttggaaataagtatttacagtatttaagcactggaatatgttgctatgaccagagctgggatggaggctggcccttctcaattttatgtatattctttttttttttttagaagtttcctcacggtagactttccaggaatggaagaggccgggagcatgcataattcatttctgaactgccagctccggggcaaagtgtctgacgtgtgttacatgagaaagtaaatgcttgccaaggcctcttcctccctctccataagggttccttacagccaaggaagggaacagcccaggggctccaaagaagaaaaagaggggggagcagttatggggagaggtccagagaagtgttacccagcttttgctctctttgatgcgtgggggtagggaacgagggaagaggcttgtgtgcatattaccatgtacagttgatgttcaggaag

SEQ ID NO: 2212 - DNA, 755 bp, Mus musculus
cacgggggcggcgcggtcgaggacgttttctggactaaaagggatccgtgggcccgaagtggtccctgggaatggtctctcccaggatgtggatttgatactgggtggttgagtggcaacagtggttctggcccctttgttcattagcttttatgacttagggcctggctgtgtataccaggctggcctgggttcacagccctgctcagatgacagtgtcctgaaacaatggccttccaaggtgaaacctgagttatggatcaagcttgggaataatactttggcaccagatatgggacttgtgggagaaagcagggctcagcttggcattggtgggttgaaggagtcggggtgcgggtgaggattgtgcctggaaccgtgggttgatgggaataacagttgggaactaaatagttcactatgaaaatctaaaggctgatggtaaatccctgcaggtggcactactttgagatgcagttgcttggaaaataccaaaatcctacaaggggaagagcaaaattgttttgcttcactgttgaatggggaagggtgacattgaaaagcttttcttagtgtgtcaatagatggttgtcactaaccatgatctaggcaggcacaggggtggagcctgtggggggaagctgattgtcaagaagtgaagctgggaggggttgtaaaacgcctcccgttgtgggctctgaaacatagtatggggaggttggagactcttctgggtctctattgaattctgtcat

SEQ ID NO: 2213 - DNA, 408 bp, Mus musculus
agctggtgctatgatgagctaactcacattaattgcgtgcgctcactgcccgctttccagtcgggaaacctgtcgtgccagctgcattaatgaatcggccaacgcgcggggagaggcggttgcgtatgggcgctcttccgttcctcgctcactgactcgctgcgctcggtcgttcggctgcggcgagcggtatcagctcactcaaaggcggtaatacggttatccacagaatcaggggataacgcaggaaagaacatgtgagcaaaaggccagcaaaaaggccaggaaccgtaaaaaggcgcgttgtggcgttgccataggctccgccccctgacgagcatcaacaaaaatcgacgctcaagtcagaggtggggaaacccgacaggactataaaagataccaggcgtt

SEQ ID NO: 2214 - DNA, 717 bp, Mus musculus
agaacatacgtcatccagaaggaatccacacccaaagccctgtctcaacctgtctgcgcctgggtctgtgccgtgtcacacgcgtgccttgctgcccagcctacagggccgtggggcagatatgctgggcccacttcaggacaggggactcgtcaatgcctaaacacagaaagcatgccccatatgtgctgtagggcagctcctggtactggggcctgctcctggggtaggaagcagctctgaggcatgcgtgccctacgaggtggacattgctaatgaacgggaatctcacaggaggtggagggtcagaactggaaaccagtctccacaaagccagcccctcggtgcgtgagatgacatcactagtggcctgtcagcgcaggtctgtcaagggacaaccgggacatctttgagagcgtacgtaaccaaactgacttagtgaaaacctggaaaacaacttccttccaggctttgtgggttcctgacttgtagttaacttctgttcagagaagtttatagatacaaagaactaaatcttgaaggtctgcaatacattcttatttctaagatttaacattcttcagggaaaggagcagtgatatgattgagcaggtgaaggcatgtgctgccagctgagttcagtccctgcgagccacgtggtggaggggagaagtgacttctccagttgtcctctgactccaaacatgtgcatgaaat

SEQ ID NO: 2215 - DNA, 674 bp, Mus musculus
cggcgcggtcgaggcggctcgaggacagtttctgtctgaagacattacctgtggtttctgactcttgaaatgtttaagcggattaaatgagatgtataaggtgcttccattcaggaccaggttaagtaagtactcatgagacgtgccgcttcctcattcactgttccttcgtaactggaagaccgcacaacagagttgcttagaaataaaatggagctgaggctctggtgagatggcttagcaggtgaaagcactgtcaccaagtctgacatgattttgatccccaggacccatatagtggaaggagagaacctcaaactgcctgtcctcaaatacacaggctctgatgtgctcggagctcctctccagcacaagaggacaccaaacacacacacacacacacacatgagtaaataaatataaagaaaagtttttactgtatctaagcattacaggtcaaattatgtgatttatgaattcagagtcatggctacgttacctccccctgaagcagagccggccggttctcatttagttgatcaagttgctgtcttctagtcctaacgcattgcactgtttcctttcaagcccagtcagattactcttaaactgtgtgcctagtctgatatggacttgcctttcttgtaatctagctgtgggcagcaagcatcact

SEQ ID NO: 2216 - DNA, 640 bp, Mus musculus
gtcgaggtgttgtgtgtgtatgtgtgtctgtctgtctgtctgtctgtctttgaggtctccatgtgtcctgatgctccagttcctcagctcttcaccggggactgcctctctcccgtgggcctctgtcttctggcgttaaggccaagtttcctgtgccaagggatggagagtaatacccaggttgcacaggaggttgggtggtgttggtagtaaaatgataacggtctggggagaggagtccttttttgtgccaaatccctaagtgccattgggggccacatatctgcactatgactgtccccctgcctagggcagggacccaagcacctgcttaatctctagtgttccttggaacttgaactgtggaggttgtgggtagaggtgcaggcatttcctgggttcctgggcttgtctcttgggggcatggtgtgctttctgactggggtagtgtgggatccctctctgaggaccccgatgttggtactaggggatgggaacctaggaacttggaactgggctgcccaagccttcggctgaatctaccatggtagactctagcccggtcccaatcttcagaaggctgcaagggttgtactctgtcctcgctgcttgcctgactctgaccttgagctcctgatct

SEQ ID NO: 2217 - DNA, 635 bp, Mus musculus
cggcgcggtcgaggcggctcgagcaggaccggcctggcctcacctctgcaaagctggggggccccgaaggctctgctgctctctgtgggtccccagcaatgaaggcataggagagtgaggagacagagatcataaggactggaatttttcatcccttttgctctggccacctgttttgagctacagcctgattatatcacatttccaaaaagtagtaccatgaagatggcgagagagatctgtcacaatgcttagctttcgactgcctgtggcttcaggatgctcaggacagaaagacacactccccaaaacaagaacatggagaaggagacctggcagtacccatccccaaggccaaggaatgaggctccctcccccaggtcatctcacctagatctttctcccccaggtcatctcagctcagtcttgatagcctctggaaagccctggcctgtcgtgttccttcactgtgtggtttctgtaataaagtgttaatccatgttaacctgtgtggggattatcgcgtgcaacagtattttctcgtgtacctctttctcctctgtgacgtgtccctcttttttttatttataaatgtctaattggtttttttttaaggacaaaccagtgtgtgtaga

SEQ ID NO: 2218 - DNA, 608 bp, Mus musculus
  misc_feature (494)..(494): n is a, c, g, or t
atgaactataacagtttcaaagacattatggaaaagagacattatatgagtaaaagaagcctgcatgctggacatgtatggtataattatttttttccttttttttccccccaattggctggaaatggactttgaagacttagcgcatgacatccatactttgatttacagcctcatgactttttgagttccaaacaacaacagaaaaagtacaaccccagagccttcttcccttgacagttgcttctactcctgactgctttgagttacaatgaacttcagcctcccgttgtacatgcactgaaggcgttccttgtcaaagatagcagaatgggctacaaatttatatggcaaatattatagaacgtaaattaaatgttttctttttagaaacaatgatgcctgctttggggcactttaaatagtgctattgccaaaagcagtctaaattttctttgaaaagaaagaaaaaaaaaatctgccccaattatttnttggtggttatatttttttttatttaatttttctattttttttttaaatttatgggttgggtcattgtcaaagtgtggaatgctatgggttctagtatataattaattctagat

SEQ ID NO: 2219 - DNA, 748 bp, Mus musculus
accgcggtggcggcgcggctcgagtaacattctgtacagcacatgttcaatacaatgcccatgtctgactgcaacctgatcttggggcacagaacttagcattggaatacacagtgcacaagaccaaccccaacacagaggtaggcagctctctgtgactttgaggccaatctggtttacacagctagtttctggccagccagggccacatagagagacctgtttcaaaaacccaaaacaaaagcgattaccaccattctgtatttgtgtgctcgtacactcagctactgagaaggctagagcaggagattgcctgaatccattaattccagactagcctggacagcacagtgagaccctagcttatatcctattagacccatatccaataaatatgacagcctgagtcttaggcatcatagctatcaggtgtcataggtatggctccaccactgggctacatacctacaaattgttacctttgtggagtggcagggttgagacaggatctcactgcatggccctgattgatctggaacttgatttgtacaccgggctggccttgaactcacagagacacttctcctctgctcccaaatactgtgattaaagatgtgtactacctcaccggaacacttgctgccccaacccctcggggttacaggtgaacaattaccacaacagctctttctatatgaacaaagatatgcaccatagacctgagtgactttcgagagctcactgcttc

SEQ ID NO: 2220 - DNA, 578 bp, Mus musculus
acgggtggggcgggctcgatgcggtcgagctaaaattatcccccaaattgtaaggtactaatggaagccacctgtgactaccggtgtgtgtgtgtctgtgtctgtctgtatatccgtgtgcgcgtgcgcgccagaggccctggccatccactgctactgtcttaatgcctgtcaagccactgtctgcctacccaacaccagctctgctcggatatcttgcaccctgagttgaggagggagatgtagagtgcggaagccaccttgactgtggttcttgattgtgtccctcatgcctgagccttgtgcatgtggcagaaggaagttgtacagcctctcggcttctgtgcatcatcatgagtcccatcagccaaggcaggaaggacacagagctggcaggagactaaagtcagagagtgtgtgtctctgtctgtctctctcatagttttaatttggccggattggttggtcacattgggtgtgttcaaattgtaagagaagaagatcttgctgatatttataatttgtatcataagaatgtcctccagaattgtcatgccagtttataacaagaagaaaaa

SEQ ID NO: 2221 - DNA, 698 bp, Mus musculus
atcacgcggggcggcgcggctcgattaatcttttctggggggttgggggtggattatctacattgtagatggacaagccagaacatgaaaaacaattctggaacattttactgtattttcacacccaaaacaaaatgctgggtacctttatcctaagaggcataatttgagcagggagggtttccatcaagtttaccttggagggtctcgggaggctgttgtatgtgtgtgtcttgtcagcatctgttattttgagttcctgaaaattttgagggaaaagaaaacctaatgtgaagtattggtaggtaaactgttttgagtgtttttactgttttacaagcagataccatttgaacaaaaaaatgtcattaacctgctgttttaaggtagtcctacacaaatctggagagcggattggcaataggaaatgtttattttagtactgcatttcagttaagtggttaacagtgttaagaggtcttgggaaagtggagaaggcttctgtgtcttcgaaatcgaaactggcctagtgcttcacgacctggaaaatgggactgtaatcacactatttgatacagtgctgcatatatacatatgtgtatgtatatgctgatcttgtttgttttactaacaagctctggaatatttagcagtcattttcactggcacaagagctttggtatattaatcaatttaac

SEQ ID NO: 2222 - DNA, 690 bp, Mus musculus
gcgcggtcgagattgagggagccacacacaagctcaaggtatgaacctggaggcagcaactgaagcagagaccaaggaaggaggctgcatactgtcactctggcttgctcagctacatttcttaagcctaggcccaccgctgttaatggactgggtcctcctccatcagtagacagtcaagaaaatgccttacagaaatgtccacagaccagtttattagagggaagtcttccttgcctaggtgagtggttgtgtcaagttgacaaaaattaaccagcatagtgactgcttccaaactaggacacctaaaagtgctggtccttaatgtgtgatctttctaaggtcgcagttggacacaagaactgggaaggtcggatagaactaagtgaaggaaggagctgaaggaatggcacatgtgtacatgtgtgccaggtgtgggatgctcctgcacatgtgtacatgtgtgccgagtgttggatgctgctgcacatgtgaacatgtgtgccgggtgtgtaatgctgctgcatgtgtgtacatgtgtgccaggtgtgtgatgctgtacacgtgtgtacatgtgtgccgggtgtgtgaggacagtgtacttgtgtccatgtttatctggtatatttaggtggagtaaaccctagggttcctctcaggagggtgtgctccttatctgagcaaagaaag

SEQ ID NO: 2223 - DNA, 765 bp, Mus musculus
tccaccgcggggcggcgcggtcgaggtgatgcctgacttagagaacgccaggttctcccaagcacaagtcagaacttctgcgaactgcaagcactccaaagtaacacggaggcctcaggaaggttctgctcacttgagaaagccttccgcagctcagagacaagcagggagctctggtgatgtgagagctggctggcagggtaacagtatagttcccacctgcttgctgcctgacacagaaacttaagtccatcagaagtatgcctctttctaattaagcaacaactggcctggaaaacaaaactctaaaaatcctcatgttctgattcccaggcttggagacgcaggaaacagatgtggtttttaccgaatgctgtgactatcagcgtctggaaagccttgcaaagctttgactgccaaatatataactatctagcaagatcatactacaagccatgcttcctacaattaacatttcttttggcctttacttcctctgtaaacgaccatttcccttctctagaacaagataactagtgtttcccttcagcacctagttaccgccaagcagatcttacagcctggtatagatgctcttaatcttaggaccagcagtgcaataattcagcgggtccttttcgttgtctgaacagagtctttcaaaggcagccaaattcatacaccattttgcctattatcactttcttgagatggttggttagggcaaaccaactcataagagtgcacattctgctgttcggtgcc

SEQ ID NO: 2224 - DNA, 597 bp, Mus musculus
gagaattgtttgtcaagtgacatgtgtaattttagttgagatatgtctgtgtatatatgcgtatttgcctttgtttaggagcacggttatttgctgaaataattgttaaaaaatgctgtcagtcttactttgatgtaaagaacaaagtgtggtctgtacatctaataatgacctttgtacctaaccatgttgttggtgatctttgtattctgtgtgcagcaatatttggtttgtgttaaagtgaaaataatggctgttatttttctggcattactaagataaattgaaaaataataaagaaaaataccttatatagcctataagtgtgttattttgcaagcattattttcgagggcagtacttggaagttgttagtgattctagtttagcttatatttgaccaggtaggttgatctttgggtatacacaggatgacgtttcagaggcagtcacatttccaaaacaatgagcttaggcggtgcacccagctggggtcgtttgacatgaaagagcttaaggttgtatctaaagaattttgtaaatacagtcactcaaaatgtatcataaaataacatatattaaatgattattaaaaaa

SEQ ID NO: 2225 - DNA, 691 bp, Mus musculus
ggtggcggcgcggtcgatctttctctaacccacctttgcaataactattccataacttacaatggggtaacttcctgatacgctattgaaagtcgaaaatatcttaggtcaaaatacatttgataaaccccattaattaagcgtcgctattgagccaatagaacagtgagtttttccccccaatggtcccgtgaacagtgggagttgagactcttaccaccgctccgtctctcgaaaagcatcttggggaatatcaaaagtcgaaccccgaaggaccgtatcctgatcgctccggcaggagttaaaacagtcataagggaagctgctgtatgtaacctgcaaaaggacgactgtgcctctgtcagaaaagtccttcaaaccagctgagtgagctgcgtgtggtggctcacacagggagtccacggggtagggagagattttatgaatttagtgactctaggttacagagtaagaccgagtctcagcccctccctccaaacaaaacaaacagcaaagcaaaaggctctcaagtgagtccttgctgactgtgtggcaggaaccaggagtcggagctccttctgctaatgtttggtcctcggctgctgctggcagatttttgctcgtctcactgtctcaactacttctacacagatatgcacttagccaaagcgctcatacacacatttaaaat

SEQ ID NO: 2226 - DNA, 737 bp, Mus musculus
accgcggggcggcgcggcccgaggtgaaattaaccattcaggcaaggaacaggcttacatctgtaatcccagcattggggagactgagtcaggaggaggaaggataatcacgaatttggagccagcctagtctatgatggtgagtttcagtctggcctcagcgacaaagtgagaccatggctcaattaaataaaaacaaccacaaaaaaaactaccacactatcaaagcaccaatgcagatagaccctcgcattgcggtcacttgtctgttgccatgtatcccagccagcagtatgggtctaggcttctttgcagcagaccttggagttttattttcacctctcctatgaaggaagctgatttactgggtgatttgtgtgtttcagtgcctggctggcttctagctttttacctttcctggcccagtttcatcatttctgaatggtaaaaaagcctctgactgtggggcatgtgggcaggtcatagcaccacagatttagctgttggtgttgtagaattctgtgctccaggtctggtggccagaggaagtcctggacgcacgttgtctgccgctgctttggagagttccggcataggtatcaagacaagacactctggactctgcaagcccagagtggtgttttgtagcccgcacaggaaggtcttaaaggtatgagctgtctcagtcctggggacccagtagcctcagtatttactttgtacttagaatgcacata

SEQ ID NO: 2227 - DNA, 331 bp, Mus musculus
cggcgcggctcgatcatctttgggccttttttccaggctttggcattcctaggtattaaacctatagcttcctatataccaggcaagtgttctacctctaagctgcagcctcagctgaactgttgttcaaattaatgggtggttataagaacaattggggccatgaatagttgagctgtttgcttctgttagatctctttcccagtccagtgtagaggtatgctcccatctactttcagctttttgttgtggaacgatggttaaatatactagctagttagtctagatttcctctcctctcctctctgcgtcctttcctttcccttttttt

SEQ ID NO: 2228 - DNA, 785 bp, Mus musculus
gcggggcggcgcggctcgagggcaaagagagctgggtgtacaggtggaactattgaggcaggaggtgaaggaaaaggaggctgactttgtggcccgggaagcacagctgctggaggagttggaggcctcacgggttgcagagcagcaacttcgagcgtctttgtgggcccaggaagccaaggcaacccagctgcagctgcagctgcgcagcactgagagccagctagaggcattggttgcagaacaacagccggagaaccaggcacaggcacagctggctagcctctgctctgttctgcagcaggccctggggtctgcatgtgagagtaggcctgagctgaggggtggaggcgactctgctcctaccttatggggccctgatccaggtgaggaagccagatgagagctaaatcttgtgggccaaagctgggggagaagggaagggacggtagttcctcttatgaaataacatcaaaggccacagatgctaactgattccaggtgaggttgaaccatagtctggtagcaagtaggtcacctaacttctctgaacttgattttccttgactataaaatgaaagtgttaaaggtcctcttaggatttttctaagtagattaaaaacataaagagctaggccaattgtggggcacctacctgtaaccccagcactcaggactctgggattctaagctccaacagtctgagacacatgtgagtgctgtgcatgatgggacctgcttggcgtgaaagctggaacaggaggattagagtgcagagcttctca

SEQ ID NO: 2229 - DNA, 679 bp, Mus musculus
tgctcccatagtccagtatctctgatcaactcagatgcagaaatgctccccagaacaccagcaaacaacttctatacatcaaaagatccctcatcacgatgcagtgggattcaacctagatgatttgacattcaaatcagtaagcatgtcacactgacagaatgaagaaaaggtttgtaaattcagtagagagaaaagcccaagactgagcaacacttcatgacaaaactgtcagcaaagtaggttacagaaggaatgtgctgtaacgtgagtcatatgtgacaaacccacagccaacacactgaacagggaaaagctgaagcttagccccacgtatttgtgtatccaatccttttatattgtgacatcatattgtgatcttcagagttcatactgaaagactatgcaacagaattacaaattaaaaaaatgaattttgtataacattttaagtttgctatttgtagtggtctgcattaatcacatcccaggttgcccatccctataagacctgaaatcagacagttaagagcaatggctaggcagagagcacacgcctttaatcccagcactcaggaggtagaagcaggaagatttctgtgagttcgaggttagcctggacagccaggccacacagtgaaactctgtttccaccctctcaaaaactcccaaaaagagc

SEQ ID NO: 2230 - DNA, 717 bp, Mus musculus
tatagggcaatgttactccacgcggggcggcgcggctcgagcttaaactgtttccttagcaacaccctctccccactctccacgcccagatgtctctcccagcccacccaggatcgcaacagcagcctgtgtacccattgctgcctgacttggttctgtaggccccagagtgcctcctggtctcagtgcaccttcccgaagacactgggtaagtggaggctgtctgaaaggcacatttccgactgggtcatgattttccttttaagttgctcgaccttggacaaaatgacttctgtacccatttagaactctgtctgcaatgcgttccattctgcctttttctatagataggctacttttgaaatcctatgcaatgccgctgctgaggtaccaggggagccaaaagttttcttcccaggaggccaagaattctgacgatgaagtccttttaacttaaggttgggggtggggtgggagtgtgacaagggcaaggactcacccagatcttcctctgaccttgcgggacacttttagaattcttatatgtttaatgctcgactttaaaattctgtgtgctcaaattccaaccctggtcaaatctacttccttgtagctagaatcagtccaatctttgcggatatcgaatgggaggtttgctgttttgacctgcttgtctcgagccgagcggttgtatgaaacatgtgctatagatgtaca

SEQ ID NO: 2231 - DNA, 709 bp, Mus musculus
ggcggcgcggtcgagagaacagagccctctctggccacccaggactgaggtggggatactcagcggttggcctaggtgtgtcatgtcctcttccaggcacactgaagccactagcggtttgtcccatactggctgcagaaaacaccagaggtggtcacaactcctctcacttgggcttcctgtgatccacatttggaagcagaagaaaacatttctgaaggcgagggctaaggctgaactcaccaagaaacagttgcagaactcaaaggccaagacagatggagggtgtgggagggctcagacacaacaagctctaagatggcagaaatatgaccgctcacaaaaccaaatcggccaagagccctgcctgcgtgtgacccagattccaaagggagggcttcctagttctagacatgtgggccagattagcattggctgtcttttctgccagcatgaattaagccctcataaggtgatgggtcctgtctgaggatgaggggagcaaatgagcacagcagggacagccgcagtcagtggcgggcagggaaggtgtcagtgctggtacagctcattatcagaaaggttaaaggtttttcctactaaaaccatcctcactttttatacatgcaacggactgtacgcgtatattacatacatatctactgtgagtttaacagaagtataatataagcccccatatgcttccagc

SEQ ID NO: 2232 - DNA, 677 bp, Mus musculus
cacgcggggcggcgcggctcgagcttcccacaagatatcttttcattggtccatcagttttccataccaaacgcaagaacatcaagacgaaactgttaactcctgttactgtctgtgaggagctggcggcaggttctacctggagaatttagagggagagaaaggtagccggataatcctgaaccctcctgaggaaacagttcacagagtagctccctggaaactgatgtcaggatcagcctttaacagcaagcctcttggcagagggcactaactaacctgctgccccagtgtaaactgaaaccaagttccagtgggaaatcaagggtgggaggtagccattggaaaccaggaaagggcaggcaggctggacagtctaaaacatcttttaacaaactaactgcacggtagcaaggactagcgggtcgcgttctcatccaccttggcacactgtatgctccatatgccatacattcaggacataggcaggaggacagctgcttaaaggggacttacaaaccaagcaccttctctcgtgtctgtgtcacagctgccactcagttccaggcatgtacaccgggggcaacttgtatctgcagagtacaagggggccggcaggctttggagcggctacccttggccttgcctgtggtttcggtggggaggacacatctggg

SEQ ID NO: 2233 - DNA, 698 bp, Mus musculus
acgcggggcggcgcggctcgaggcgattgttggttttctgtctctatagtgtctgtcttctgctaggatagaaaactatcaaacccattgaaaaatagaacgtaaattgagttaaataagactgtccatccccaggctggggaccacaagcctgcaagtactcctgctgtgtgtgttgtgctgagcacctgatagtcttgcaaagagctgcttcctagcacattgatggtttaccctgggatgcacctcctaccataaggagaactccattaaaaccagaccaggtttcacaaataccataccaagctgggcaatggtagtgcatgcctttaatcctagtacccaggaggcagaggcaggaagatctctgtgagtaaaaggccaacctagcctacaactctagttctaggacagccaggacctcacaaagaaacacttgtctggaggaaaaatagataaataaaatccatcctgtccaaacacaaatccgtctcactaacacatgtgtgtttcatggcacggtacctgtggagtggcttttcatttcaatcctgcgctctcactgtttctactgaagcgcccaggcagaagagagctacgctcaggtgaggctgaactgagtgtggcaaagctaagcgcccttcgcacagcgctcttgctggaaaactggcattcgcagtgggccgcacacaaatgga

SEQ ID NO: 2234 - DNA, 640 bp, Mus musculus
tgttttccgtattgggaacagatggtatagatttgccaaggcctttattttaaagtgtcttggaaaatcgtatttaaatttgcaattattctaatttgatatagagagaaactgacctatttaacaaatggactctcttaattctactggacccaggccttgaactttctggtttctgtctctgtgctctgactttttgatttcaggtctagccctgtgcacttacctcagtactcagtacttactcagtactaactcagtactcgtgggaggacacccgacccgggtgttctttgagaagcagctgagtgaggcatgttttgacaggaggaacccagttcttttcactgttggtatttatagcacctaccttcagatttttcagtatgatgtttctattttccaatactggttccctaacggtcaacatttcttctcccaactaaaaatgtaagaagaaaaaaaaatttttttctttttctctttttttttttttggtggtacagaagttttgggtggggtaattggttggttggatttaactagatgactgtcttcagaataatcctcacagttctggaagattgaaaaaccagttcacttgaaagaacaaaacccggtttagggttgaatgtggggg

SEQ ID NO: 2235 - DNA, 646 bp, Mus musculus
accgcggtggcggcgcggctcgatcaaagctgagggcaccctgccttccacccccagtccagcttgaccttttatctggagcaacagtgtctagatgatgggtgggtgaggggtgctatactgtctgtccctctgggaagggttctgttacttttggaggcagctaggaagtttctctgtgcagctgccccctggtgctgtgtggtgacctcattgcctgtgaccccaggatcacaggatctgggctaaagtggtagtccatagaaaccaaagacaatgatttggtgtttagaaagctactcttggtctgggtgaagtctggtgcttaagggctatcacaaagagcgtgtcaaaccatctctcagcctgtgagtcagtggggagcccaagggcatcagtgtttggaaactggaatccaaaccgggcaatctcggaaggaaactgtttaggaattgtgatgggacgggccgtggctgtctctgaaaagggcctgccagataacttattacttttaaggacacctttggctcttactaatttataaagcattttatataaacacaccaggagtgcatggtgaactacacgtatgatcagttaagtggggctagaattaggtagggagagcatcggacctctgcctcct

SEQ ID NO: 2236 - DNA, 699 bp, Mus musculus
gcggtggcggccgcggctcggaatgaaaatagggataattggagaagggggaaagaatgcaaaacaatatagtatccccttatggatggtcaatgtgcaacagagaactattgtatacctgtggcagtaatggtacccggggttggggtcgggtggagaacaacctggaacttgaatttaaggatgagctctgcgtttcttgtgcactgtgccaggtgtctatagtgaaggctaatgacttacttctcccttagaagaaagaatctttttcttttttttttggctgtcccaataatgcatagttgaggatgtggagaacaaaaattgaagcaaatacataggattgcagggtaaagaactgcagtgttgtgtgcttgctgtaggaaaagggtcgaagcactaagaatgaaagtcaccaaattgactggggaagcagggaacttgtaagctgatagctgctttagtcaggtaaacgttgtcacataccttcacataagggatagtatattatgggttgcagtcaaacttcatgtgtgctcagactggtgaaaataggaatggggcttttgcattttaaagaaggtactaggctttgcattttaaagaagatagtttctttctaattctctcatctacttatttacctacttaaaggattaattttagatccccctgataaagttttcttccttttttttt

SEQ ID NO: 2237 - DNA, 686 bp, Mus musculus
ctcacgcggtggcggcgcggctcgagagccattgagcatatttgaatgtggctttcaccagcaggaatctagcacacagccaggacctccccctaccccctctaaggtcgctgagataggggtgtcagactcagtccaacaggaaaagcaatagacaaggtttctgcggagccccagcctgccaggtacaaccaggaaaactggttggggcagctgcccagaccactggctcctcactcctcagcccctcccactggctcagggaaagaaaagtctcctgtaacacctagaattgttgttcctgactgctagttggatgccaggcactgctgggtcccttcagtcagtcggtgctgtgtaagaaaagcaagctcagaaataccaggccagtggttcccccaaaccatggagcctggcagagcagaggcttgagcctagctgctatggattctcccccctccccctaaagagttttccagttggtggatgacacctctagccagactcatccctgacacccgggctccacctgtcatactctgctcctgcccacatgccagtgcagctctgaggaccgtcttctccctctctgtcagccccgccttgcatgccctctaccatctgctggtgtgatagagattcctgatgctgaccgaaactctgcatctctacccagcctctctggg

SEQ ID NO: 2238 - DNA, 658 bp, Mus musculus
tggcggcgcggctcgaatggaacagtcagagttgtgattttttttcgagggatgataatgaataccaagcagctggaatgataactgacaaaaaaagaagccacaagagtaggagatttggattctgtgaaagccatgttttcacatgggaaagtagaaagatcatagagcattgagatcacatgaagcaaatcaggaagcagaactatggcctagcacgcatatacagggctcgtcttcctgccagctttactctgggcattttacaagtacttaccaacactcataaaggtgctgggagataagtgttctacccccacctcacactggttcaggagtagctaagaaatggactggtcaggggcaggccgtcccaagactgtgctcagcatcacagtgtgccaggtcccaagtctcacataaggagacaccgagaggtagccatttgactcagaagccggaactcaggttcagagtcagaagccgatggatgcctgcggccagaaggcagagggagcaccaccctgccttcacttccaactgtctgatttctagagccataagaggaacacattgctgttgttttaagccacgtggctaaaggaaatttcctatatcggccacaggagactagtagcattatcacatgcatatactg

SEQ ID NO: 2239 - DNA, 743 bp, Mus musculus
aaaaatgggccacggtggttggtagccacctgtaatcccagcacttggcagaatggaagtcagagaatcagaaactcagcgccatcctcagctgtggaacaagtttgaggctagcctggggtacataagactatctcagaaagtggggcaggggagaaagaaagaaaagcagtgactttgtcctgtgttgttaggtgtctaggttttaagagaagagcattttctgccgggatacaaatgaagatagtcgtgacattatgttacctttttcaaagagtcttggaatctttaacacctaacatttccggcaatgtggctgcatcccaggtcccacaggaagcagtactttttgcagaccagctgccctgtctttggaccacttccttcagactgtctggacttttcgcagctttcctgtgctctgaggttccctactcatccccagacttcagtaactttctctcgctctctctcctcttcctcaggagagcagtataagattgcatctgcatttaccggttctgacataggaattcggaggtactggagcccggaggccaggaagagccctctcggctcccaaagcagatggtcaaagagagatggaagaaggaagttatgtataagccagaacctcaaacattggacacttgcctgtgtgtcattcaaactcaataaaaaccacgggtgggaaaactggctgtgtcagtttaccaataacacattacgtgcaggtatatcaa

SEQ ID NO: 2240 - DNA, 731 bp, Mus musculus
gcggggcggccgcggctcgagctctggggaaagtaattttctgggcatgatcctccctgtaaagctgattgggaaggatcatgcccaatcagctttacagggaggaaaaaataatacaagcacttgactttgtagagagagtgcaggatagcggtagagaagtggacaggtaacaattagcatatttccccaaccaacaactgacctttagaacaggggaccagggctagctagagttttaagtctaggggctgcagtaatcaagagaagcttagaattctcttggattctctgcttgtaaggaggccagtagaggtgtggccaagaacgtggagcggaaccgcgctgtcacactgggctgtgcttgctttattttgtccctgtgaagttctcattaaaaacaaggttattatctgcaatatcccttccccatgcccacacataatagtgtgaggcatgcgctgaaattggtgggagggaggggagcaacaatagaaaccatgagcaatggctttttgatggctcatttctcctgccagatgagaacagggtgggtgcctgtgggtgccgttatcctgaccattcttccgatcagaaaatggaccaaccagcaggattttagtttcccagtcagaagagagctccctttaggtcttggattgttggcatttgggagacacagtagaacccctattttcagtattggagccagccagagagcctgcaccgag

SEQ ID NO: 2241 - DNA, 684 bp, Mus musculus
ctccaccgcggggcggcgcggctcgatgttcactcccctggtggctgtcaaggactaagagccaagaacatccatcacctcttagcatagctcccacaagtacctgtcctgcagggcagggcctcttcccacttcatcctactagactaaactttagtaggaacagtaaagaaaggagatggcatctccttgagacttgccagtctgtgaaatgggatggtcacagctgatactctgctgctgtaagaacctggatgatcatttgaaagtctgagttactggataagagcggcacacagaacattagcttattaactgcctccctctctgtctggatttgcggatagctacattgactccatgaaaagaagccacattcccagaacagaagcacaacccttctgaagttactggaatgagggtacaggtctgcctttgggccctttatataacagtagctatagtcccagccgtggctccctcccctccctgcaacacagctctgtaagctatgagaagagggagctcttccttcccattcaggcctttggctgtaaagtgtggggaagcaggctgaccttagagggccatattgctggggcttcccatatctgggttcttggaaaggcaggaacatccagacttgcatgggcactgctgataatttgtgctgtctggtatctg

SEQ ID NO: 2242 - DNA, 652 bp, Mus musculus
caagaaggaaataaattcaagaggaaagactattcttcccagatagcagaaggagaacaagattcaaatttaagagagagaagaatgaacgtgtcaaagaatgatgcaaataccaattctgccttctgggactctcttcatttggatgatgcaacgaaggaaagttcacacagaagggagagcgcctccgcgtggaataagaagaaattgccggccgccacacaagtcaccaggaagaaatggacagaagcaatgcctccaaaactccgcctacaccttctgaacgaagagctgggagaactcagcctgaaatgccgggagattgaacgggactttgaaaacgccgaaaaagaacttttgaactttagaaaggaagcctccgtgaaagctgtcaattttcaagaaccagggacaggtgcttccaagaaagaccgggaactgcaagctttaaaaaacgacctgtctgaaaaagcgacaaacgtaaaaaacttaactgaagagctccagcaagccaaagaagtcatgtacaggttgagcctagagaacaggaacttgaaagacgctgtcaggaaactgaagcatcaaactgaactaaatactgcgctcctcagagaagaaatgaagtcgttttacgagctggagatggaaaaga

SEQ ID NO: 2243 - DNA, 693 bp, Mus musculus
accgcggtggcggcgcggctcgagaattaactggagaatgaagtttaaacacttctattctagatctgagcatgtggctccaattttagtgggaaggaatgaaagtagtgtatgatttcaagagattgaagagtttgggatttttgagttttaccccccttcagatatttcaagtgaccacattataaaacaccctaaggtggtaacgaggcaggggaggatggcatgaagttgcattaagtttcagaccactgagagccacatttaaaatacctcaggctaattactgttcactttggggcaggagtaggttttgccagggtatagtaattggattgcactccaaggaaagttcctattgttaataaaatttacgtagaggagaaacgtttgtttgaggtggtagttctttctgtgaggttttagtattcgaactcttagaatgtgaacacattcgagagctgacttcttcctgagagttttaactactggaaatccttaaccaattatattttctttattttgagaatgattggttgctttttcttagatggtttctgctattttctgtaatcatagttcatctaaacacagcctattttcgtgaacattgaagtttgtacggaaagataggatctcattttcagtgaacttccagactaagcgcactcttcccttccctctgtaggaagt

SEQ ID NO: 2244 - DNA, 668 bp, Mus musculus
  misc_feature (593)..(593): n is a, c, g, or t
tccacgcggggcggcgcggctcgagcggatttaacaatctcatctgtttataaacctttttaactttaggaacttaaaaccacagtctgaaagtctgttaccagctggtgtcaatatctttctgtctggctgaattttatagattagtttgtttgttttaaatacctttaagcagcaaaatgtgtctaaaataggtctgttgccatatgtgaattctgtatcatcatttaatgaacttcaatgtccttacagaattaaatagtggcttcataaaatagatctaccaaaagctgccatttcagcatcttcatatactccttccacacatgcactcttaagttgatgccctgtgtgtttagaacagttggtaaccccagtcctcaaagccatgtctgatatggcttaaatgttttttttaaaaagcaggacttgccttactatccaacctggcttcaaacatgttatcctccagtctcagactcctggatactagaatcatgcatgcactacactgccatgctagccttcatctgcctttgtttcagtatgtagcctaggctagccttgaacttagagcaatcctcttgttctgnctcacaaatgctaaggatacaagtgtatgtcactatgcctgcttttaggcttacttcttgagtcagccagtgagc

SEQ ID NO: 2245 - DNA, 646 bp, Mus musculus
gcggggcggcgcggctcgaggcggctcgagctcgagccgcccatctcaggaagttggagtccagagtgactggatgtaaagccaccaggaagctgaagggacagcctgcattctgaggcctgccaccactgctcccacaaagcaggctacagagcagagccctggtggccacgagagcaaccccatctagaactttccatggtcacgtcctatatggagctaccacacgtgactgttgagtgcttgaaatgtagccaatgctaatctggaattacattttagttgtattaagttttaatgggtttacgtgtaaatagttccctgtggctggtggctgttttttggatagtgtggggttagaagctatggggctttaagtgaggggcttgggagccaatgacacctctgctctaatcatgaccttatctgtcacatcatgctccttctgtcaagttgtctggaaatgttgtatacgttcctgtggccatagactgagcgtgggaagctgagctgttctctggtgacgccgacacgggttagggttagggttaggacagcacgatagaaaagtagggacttcagtggggctgcaactgagaaggcttcctggaggaggaggcgggtgcagttgggctggagcagagag

SEQ ID NO: 2246 - DNA, 705 bp, Mus musculus
gcggggcggcgcggctcgagggtacttctgtggggtgatggcagaagacagaaacattagggtaggaataaggtagaagaatcctaggcaggtccctaagagtgctttcagaaggatctgaaagaataaatgtgcaaggctgggtatgttggcacatgctacctaacctccaacctcaggccttagaaaagagaaaatgagatatttaattcagctgtaaaactatggttctggcaaaaaagaaaaacagtgcctataaaataactgtgagttctatgtcattgataaccatggacaaatgtctcagactgtgttttaaaaaaacatgattttcccacaatggtagacctaatcacctagacttttatagctaggtgaagttagagagcacatggactcagtggagtttgtcctaaatgcagaggttgacagtgatgggagcagtgagtggaaatcaggaagtgatcagacagggctagaaagacttgggagttctcatattgattggaaggttccaaggagtgttgttgaggaggaagtaggtagctgtagaatgccaacaaacattttgaatcaaactggacataccactaatgcaaaatgaaaaggcaagagaggttaaaaccaacagaagttgtggctcaccctttataatggagccagggcaggaaagcaaaaggcagaattcagggtttccaaagtggg

SEQ ID NO: 2247 - DNA, 758 bp, Mus musculus
gcggggcggcgcggctcgaggatgcctcctggaagttgagagacagggccccgaacagcctctccccaaagaagcttggacaattccacaaaccttaaagggagcttgtccaagggccacgagaccagcgggaacactgatcactccacggagaacgcctgcctgactgaaggcaaagaaaaggctcctgagacctctcgttctgatgaatgccgcggccctgcctccacgccagctgagctgccctggaccaacattgacctaaaggagcccaagaaggtgtctaaccagccagctgctggctttcccgagacggcgggcctctcctccctggggctcttcccgatgggcatggaggagccgtacggggcagatgatcatcctctgtgggcctgggtgtctggaggcgcatgtgcagtggaggcgggctctacacttaagtggttcaccatccagtcaggcctgtccccttcagtgcagacgctgtccctgtccatcacccctgcccagacggctgcctggaggaagcagatcttccagcaactcacagaaaggaccaagcgggagctggagagcttcaggcactacgagcaggccgtggagcagtcagtgtgggtgaagacgggggcctgcagtggtggtgtgactggaagcccacaagtgggtggacgtcgtgtggccctggagcagttcacagggcacgacggggcctcgagacagcatcctcctcatctattatgtggtccatgagggagaag

SEQ ID NO: 2248 - DNA, 746 bp, Mus musculus
  misc_feature (591)..(591): n is a, c, g, or t
tctctatagctccaggtcaaccaaggccacatactgagactgtctcaaaaaggaagacaaaaaggtaaagggaccttgcatggccacggtcttctgagttggggtaaccggccaggggagggaatgccggctgtgatggttggtttttatggtccacttgacaaagccacctcggaagggagtctcagtgaggaatgttctagatttggttggcttgcagacatgcaagattttcttaactgaggtgagaagacccatcctgaatgtgagtggcagcatttcatgggctggagccaggatcaaaggagaaagagcaggctaagcacttagcaggcattcacctttgatggtgagtatgctgtgaccagcagctgcttcaggttcctgccactgactctcctgtagtaatggattctaacttcaaattataagcccaatatctgccaataggtgttatcatgttttagggttctctaaaggaacaggactagtgataacatgaatgaatataaagagagagtactgagggcagcaagagtgagggccggcgtacctaaagcaaaagctttcttcttccatatgatgatatgntggactcccaccacagggtgtgggccagatatggggtgggtcctacccccgaaatgatccagatttagagtgggtcttcccaactcaaatgatcaaatcaagaaaaggcctcacaagggctggctagtttgcttgagtctttagttgattccaga

SEQ ID NO: 2249 - DNA, 849 bp, Mus musculus
aatcatatagggcgaatggtgtcacgcggggcggcgcggctcgagtcattagggtccatagtccagcacagggacatgaagaggcaagtgaggacagagttggtctagctcttctgattagtttttaatgtcacacaaaagaacttaaagatgaacttgccttacttcgtccttggtcctgtgtttcctggaagtattcaaatatgggcagccatcctgcagagatggatactaaccagcagtggacaagggaagttacagtgtgatgtcagacatgatgctgctactcggcacctccttccagagagcgagctttgaggatgaggctggagcttctgttacacagatggagcataaggaagagatggcacttgaggacaagtctgcaggtctgtgggtcgcctgacccacaccctttccacatccacacaggtctcacctcttggcagatggcatgctgggagttcttggacttcttaatttatgacagttttttttatgttatttatgtgtataattaactactttgtatgcagtacccttatgaaatgaacttggctaggggtgaactgttttctaaaacatagcctttgttctccaaataaaactattccaggaaaccatggaaaaaatgggcaggcaatccatagccctaatctattttttaaaaatttcaaccgcagttcctctttgcctttatagcctctcaaagatgaatgagctgagcccaaatgagcactgggctcaatcaaacatcactagcatttgacttttattctcttctcactaaaataaagacctttgaaatcacattttttattttttaaagatgtatttttgtgcctatac

SEQ ID NO: 2250 - DNA, 902 bp, Mus musculus
gcggtggcggcgcggctcgaggtggcaaggagagcctatagttcagtgcctgtttaggtgctgaggccatagggaagagggtagggtcttccctgtttttatcccttcagggtcaattacatagaagctgcttataatactagtatagctctgtggccctttgctcagtcactgaggtttgatttctcatcctctttccctatcatcatactcttcccaggaattagcaagaggggtgaaatctttcttaatcatggtaaagtattagccttccatctcctcccttaggttctgccctgtccccctttcttaaagcctctacattttacatcactgattgccttgtgtccttccaagacttttttttgtttttgttttttgttttaattaactcccatcctccagctgtgggcccttgtagacactagccctcacgccctaaggataggaggaaagaccctgagttcagtgttctttaccactggactcaaactctcagctatcagtagagtggggatcaaaccagtacaatctagcttcctctagaccttgaggcactacaagcagtcattcatggatggtgtcttattccacagcaacctgaaacgggtggattagtggcaaggctggggtaaaattaggagacagaagtccttatttgtcggtttatttgtcagtagaccacaaatctgaactccctccattgtgaataagtatttttcctgcattatgagatatatgtatgggtagacatttctttttaaagactccgagataaatgttttcctgccttggttactttcctttccctttaagaggaattagtatagaaccgcttgtaaagatgcttcttgatattctactttgtgccctttcccaaacattcccaattccccctttct

SEQ ID NO: 2251 - DNA, 791 bp, Mus musculus
ggtggcggcgcggctcgaggttgctgtgataaataccacaatcaaaaacaacttagggaagaagaggtttgttgaggataggaactaaagcaggagcagggatggaatcgtgtaagaaaggtgctcctatagcgcatgctcagctagcttccctgaaccgggactacctgcctgcctatgggtggcacttgtctacagcagaccacattagtcaacagtcaaaaccattccagacatggccataggccactctgatctgggcaattcctcactccctcaattgagactctcactttccccgtgatgttcttaattctctgcattaaaaataaatgagccatacagaaacaaaaagagaacagttctgatgtctgtacacttaaatgataaaacagcaccagaattctaggtcttatgtcaattaatgcaaagattatgaagactccagctcacagtttcacaatattctatgagtacataatgcttgcttaaatagacatgttctaagtgactatatacatcttgtattctaaattgtaacttgtgaacagttgcctacagcatattttaaaaacgcaaagaatgatttaagatctgcaggatccactgagaactaagaacatttgttttgagaactgatagtttgcatgcacttttttttctagcttagtgctacagatggtggatgtaaatgctagcaagaaatgtgcttaagatgccagttcatgagtgcccctctagttccaccaaatcacagagtcacaattccttagactggggtctacaatacc

SEQ ID NO: 2252 - DNA, 824 bp, Mus musculus
ggctttgagactgtcatttaggaatctgtaaccttggtttctctcctcctgggcaacggccacaaccggggcacctgtttcacaaggcaagctggtcaggcagggcagactctgctgcttgccaggctgtaaggaagagtcagaagccattctctcaacacggaaccaggagaatgctgtactccaaaggctgaggcaaacccttgcctgggccaacatggtgctaagacacccagctcccaggggcaagtctggccccacgctgctttcttctcttgcccaccatgcaggccaacagagatcaaatccacagccacaacggccccattgaggaccagtaaatgtgtccacggtgtggggttacattaggtgctatgctcctggccacctcctcagagcaaatgaccaggacagccactttccctctctgcaggccccagtccagaaccttcagggccaagcagggtagaaatctgatcacccgttgcattcccaggcagcaatgtcctctgggacacccactgaccggggaatggaggcgtcacaaaggcgagagccaacccaggctgctcaccagggacgtgggctctgcgcccagtgaggcgatggtgaacgaaggcagaggcgggaccccactacagggacactgctggctgcctaccctttgcctggccagccctttgcactcaaggctgctcaatgacgcgagtgctgttatttctggttcacagtggatacagcaagccacagaggtgccacagttctagaaatggtggtcttggaggagctgggtcaggatttcaagctgggcattccgattccag

SEQ ID NO: 2253 - DNA, 482 bp, Mus musculus
aggtaaaaagtttctttcaaaagtgccccggcatgagtaagtgaggctctactctgccctgctgttccctgagtaagatatttgggatttcctggttggaggctgagaaaatatatccttagaagtaaataaaaatgccaaaaagataacatacatatttcataatgtaaaaataccagtaagagaagggtaaaatgtatactctccctgaccatattatttggtattcctcttaaatggaggaattgttcatcaaagctaatattagtctgttttcaaagaaatttctttctacctagaaaatttgaaaaatgtaggccaaatacctacgtatcttcatttctatgtggcagtggctaacatctcccacagctgctctctctttcttctttctctgtaacctctagctccagggcatctgatgccctattttggcctgggctgtcactacgctcacatacaaagacatggacctgcaaaaa

SEQ ID NO: 2254 - DNA, 194 bp, Mus musculus
  misc_feature (54)..(54): n is a, c, g, or t
acgcggggcggcgcggctcgagattttttttttcattttaaatataaacttttntgtggaaagtatgctcaatgtttttttccccctcccccccattcccttgtaaatacatttggttctatgtgacttggttgggaaatagttaactggtactgtaatttgcattaaataaaaagtaggttagcctggaaaaa

SEQ ID NO: 2255 - DNA, 520 bp, Mus musculus
  misc_feature (305)..(305): n is a, c, g, or t
gcacattcttgccgctgcccccaagttaacaacagtaggtaatttgcacacctctggctctgtgcctttctattaggactttttggcagaaggtggagagcgggaggcttaagaggggatgttagggaagaggtgaaggtgggaccacatgggacaggccacggctcctctcatggcgctgctaccgatgactcccaggatcccagacgttcagaaccagattctcattgctttgtatctttcacgttgttttcgctgctattggagggtcagttttgttttgttttgttttttacaatgtcagnactgccatgttcaagttttaatttcctcatagagtgtatttacagatgcccttttttgtacttttttttttaattggtgatctatttgggcttaatgtgattaccgctgtattccaaaaaaaaaaaagaaacacgggtcccgtgttcacaatacctcagtgttttcatttagccagtgcacgaagccgtggcaggcaggggggcggtcgtgcctc

SEQ ID NO: 2256 - DNA, 390 bp, Mus musculus
caccgcggggcggcgcggccgagggaagccaggggttatgctttcggccttgatgtaaccaaaagtcaacccatcacagttaaaaagaaaaaaaaaccatcttggtctttgtggaatttgaactaaatctatgagccttattcaatatataattctatgattttttttttaattacgggaaatcaatggaagatgtttacatgagtaatgttgcccttactgtgttatgaatgaatttttgtagtgtgtctgggcgcatgtgcaagaaagtaggaaaaatgtttctgaaacaaaacttgacaaatatttgtaatgaaaagtaaacttaaagattgctataattgcgctatagaaacaatgcaagtattaaacaaaatatacaatcaaaaa

SEQ ID NO: 2257 - DNA, 569 bp, Mus musculus
  misc_feature (527)..(527): n is a, c, g, or t
gcggtggcggcgcggctcgagcagtccccggtccctgcagggttaagaaccaagagaacaaacactagaggatctgaatgtagggtgtattgtgtcacttttgaagcacatagtgataggtaagagaaccagatgttgagcccctagggacggtagccccttgactgtgggctgggcgtggcttctacaggttcagtcagtagccaccctcagcagttgagagcaacagtaccttcagtggcttcatttcctgtcttgttgacagagaccctcgggtaccactgtgctgctaatagggccagggctctgctccccgacgaccttgcctttgtacagaaccaagtccacgcacccagcaccccaccagcacctctgggctctaaactgctttctctcatcaagcatgctggcattcaagacagatttctcgacctttggcagacatggaagtgttttaagattttatttaaatgtctttgttgacccagaaggacttttagattctgagatcctaaggacccccccgncccccatgaccatggggtgaccggaatgtggctttgatggct

SEQ ID NO: 2258 - DNA, 616 bp, Mus musculus
tataatactatataattatgtcctttcttccttgtaatggttgtttttaaggaaagtatcctaagttaatagaaaccaaaaaaaatggtaatgggcagaaagagatagccacagagggacacaccttaaggcattataagtgaccttatttctgcttatctgagctagagtggtgctactgatagagtccctgagacttgtcacacataagtgcaccaagatgagaagagctggggaaagggggtatcctttcgatttgatttcctggtgaggaccatgaaggacttccctgtgcctggaagaacatgccactgtacctagtacacgatagatagcaaagagcacagctttacaacaagcccttcctaccttctcccgccattctggttgtctgtgcagaagattttgcaggattggaacatggtggttgttttcccaagggcagcgtgagctttcagagttggggttttcccagtctaacaaagatcaagggtctgggggccctaacctacaaacctttaggaacccttccaaactcccaaacttccccaaacacatagggctaccctcgcaccccaataaacattacatgttttttaaaccttcctataagaaa

SEQ ID NO: 2259 - DNA, 581 bp, Mus musculus
gcggtggcggcgggctcgaagctcgagccgcatgtctcaaaacatacggtggcaactcctgaggccacaacacccaaagttgacctcttacaggctcacacattacatgtgtgcacacatcccacacaggaacatgtacagccatgtacaaacgcatacaaaagagcaaagcagctcttcgagtatatctcaaatatctggtcccgttggtaggaatgccatcagcccaaaggtccttcccactgagctgaagaacacagacaactctcttgcctggtggtgtgtgtctggggtgctcctcagatgaatgcagccaagtcagctgccctgaatagacagagggccactccaggccggggcagcaatctgcacccttctttgattctccagggagtgaagtatgcttttgcttcttgtcaggccccaaatgctcccatccaccagagaggggaggctgtagcagaggaggggaaagaggtaggaagccgtctgagccctcactgtgctcagaatagctgtagacaaaggagaagggcactgagctatgatgagctttggagcatctcactcaggcactcacc

SEQ ID NO: 2260 - DNA, 777 bp, Mus musculus
gtcgaggtcactccctcctctctgctctccctggccctctttgcccctttaatcaaaaggttcagagaaagacaccagaaagaggctgaagtttttaagaggcagctttccaactttgcacacaaatggaaggtaccatgaaaatcctctcatccgaaacactcggcagaaacaacctgtcaaatcaaaaggactaaactgctgcccacgttgatgcgctctgcgagttacctataagtgtttgttttcttatacttgaaaacacttttacaatattatgttggtggctttcttttctctcttctgttgggcaattgaaactgcagatgacaaatgttaaggctgtttgaggggagaaaaggaaggctgtggcattgtcgttttaacatagaggttcagtcagactcccatagggtaacattgttcatcttactggtttaacatggacacagaaactaggcactttggtggttcacttgcacggcaggccgaccccctttctatattttattttacttttttagtatagtggtacttaaaatcactggttcacttaaaaaacaaatgttaaactctactaatgtacaaataagctgaaaagttgcattttatgtgtatttttgccatagcaggtactgtatttctcatgctggatttcaaaaaaaaattatatatatatatatatatatatcaaaaacaaaaaaatgaagggtggtgttttctcagattgtgacaggttgattggtaaggattaaagtcgtagtcatttcattaaaa

SEQ ID NO: 2261 - DNA, 856 bp, Mus musculus
gcggcgcggtcgagcaatcccaagtatgccattatggtgaatgtgcatgtaaactttatgtaaattatctctgatcttacctgatagccttagggtttttgttttgttttttttgttatgttttcagagacagagtctcgctattggtttacctagaattgctttatgattaggctgtccccaaactcacagatgtctgcctttctaccaccacgcccatgtaactgatgttaccaaaaatgatctcatatccatggtgttgcttatgtgtctttgcataggcgcctccttcagtcccatctaggagcacagcacagtagaagtccatttcttaagtgggcagagtcagagataagctaagagggcaagtagttgcttcagtggtttttagagcttggcaaacgctttactgaagattagcattgtgttgtgacacttgagggccaatacgagcatttaatttgttacctaaaggtgctttgtgttcttaaacagcaagtatttgatgtgtgtaaacatttcccttcattctccctccctcctcaccgtttttatggtctcctatttctgagttagctgcatttggacattgcttttatgccagaggccatctgtcaccttggatgtttagaagtacagtgtacttatgtagggtcctccttgagcctgtcctgagcagtgttgtggttacagaattgctacgagctccaacagagaggtggggaagctgggagggcacagtgtctggcttccttgtggaggtgtcggttgttgaacactaaggaattgaggttaatcttccccctcttcctgccatagttttcacttcctttcagtaagaacgaacccctaaaga

SEQ ID NO: 2262 - DNA, 846 bp, Mus musculus
gcggggcggcgcggtcgaggaaaagcctgggtagctaataacaagaattgctcaaatttattagtaaactgagaagtgaaaattggagtaaatgctacatccattgtcttggtaatagtaatatgattaattcccagcattaggaattcaacactttggaagtgctgagtgaaattgtctcacagttctcctttggcccagtcgtcttacttcaggatttctgagtgagagaacttccaggagacaaatattaaggcagacgattagacaaggatcttttcaccttgggaagttaatgagttaagtttgccagatacataatgtagaaactaacacagcaattaggagcaacttgctatagagagatagaataataatagtcttaacattttagcataaaggagaaataagctaaaacagtgccattctgtcaccttaaagtatatacattcctccacacatatcacaatcacgcatcaaattcacgaagagtatccacttagaagagggaaatgggatgggcttagtgataaaacatacatcagtagctttactgcagccagggacgcatccattcttatctcccacaaagtattttactaacattgaactagaatctgagacacaaaactgtaatttacgtaaggttgcattataggagcagaggtagcattcaaactctcatgtctgactatcaagccatttccccagtgtgtaaacacaaagagggaagagaacgaaactcagtctcgatgactgacgtacgccaagggcgttccaagtgtacactggcaaaagttctgacctgagcatgatcaggaagccatcgccactgcaacacgtgtc

SEQ ID NO: 2263 - DNA, 787 bp, Mus musculus
  misc_feature (672)..(672): n is a, c, g, or t
cgcggtggcggcgcggctcgggttcattaggttcccatcttgtcataataaacaagggatgccttcgaagatgcagtcttcccagacccgggtctgtagtaggatctttgagtttcttgcggtttatggccatattttctggtttcagtttgactgaggaacccctagggtgcccaggaataatactgaaaagtcaaatctttattttcgggatgggaatcagagatcccacaatgaaagtgcctgagtgaagggagagttcctacagcagtgtcagaactctggacttcagccatcaagggtctggagtttagctcatgtcccaaatgagaaagtccttctttgcatcagccatattatggggccactgtctgttcccccagatgcctactgaattctacagccatacagaaaatagccctttccaaagagggccttcggttctctcttgatgggtgctacgtaggggtggacagtgatgccctcgatgggagtgtggtcctggaggtgccctactgtgtcctgccatgccccttactcacaggacatgagatgcaaaggctccccacctccagcccacaccatggcaaccttgttctgagtccagcattggggcaggtggacaattcaccagagtgcagcctctgggtgcaaaattctgcaccctggcanacccagtgaggggtggtttagatgtcgggatggatgaggggaggtgacattctctggacccaagagaaatgtggcagaacagagcggttacctttcaagacgaatgaatgcctcg

SEQ ID NO: 2264 - DNA, 858 bp, Mus musculus
aacgcggtggcggcgcggctcgagcgagagtctgtctaggaatgcagttagtaaagcctggcgtctactgcagagtatgtatacttggtggtagagggcttgcttgaagacccaagttccatccctagcaccacagagcagggaggggacacagatttaggagagattgtctttttctccttggctgtgtgttgtccaggatatatatttcctaaaatctttttaaagtgaatttatatgtgcacatatgtgtgtgtagggggaggataagaactgaattatttgaaacaggttattatttgaaactgtaatcactgcattcagagggggccaaggcctgtttcaaaaacaacaaccaagacaagcaaaaccaggtgttgctttgctatgttcctgtacactgtgggagaggtaatagcatctgtgggacacagcagaattgtacaagtgtacaattagtgtgtagcagagcacagcagttacgagcttgtataacgaggactctggatccagatttaagtagattcaaacaccacttaacaccagtaaccgattttaggaccttgagcaagttaaataacttcttcctgccttgggtttccccgtcagaaatggggaacagtggtagctacctcataacttgtaaagaatccaatgaattaaaacacaggtctcagtattagcttgtattactgtactatcgagtccatacacggtctctaaagccctacagagggttcatgtgtttagacctgagaaatcaggacatggaaatcagagcatatacataagggacttaattttaatgtatcatgtctaatgatcctcatcttcattccttgagattaccaagtacgt

SEQ ID NO: 2265 - DNA, 921 bp, Mus musculus
  misc_feature (421)..(421): n is a, c, g, or t
gcggtggcggcgcggctcgagcccggcatagaagtgttcccagccccgcctttatcacttcttgcaggctccagcttagatttcccaggagcatcctcctaacgggctgatcataccctgcaaaattctcttacttcaggtcttgccttcttgccctttgagcacttatttgagtgcaataaccttttgatttacttttccctgtaagtcttgtggggtaggggttgtgtctataacagggtgtcgaatagttcattgattgcatttagaagacatgaagcggaacgatatctcagccaccagactgcatggacatttccttacatttttcttattattgttttatgaccttgacattttaaatacatccacttgaactttagcttgaaatactatttgagatcgacattcctcccccccnaccccaacaagtagccaaatacaattcttttaacagcctccaacccaaactgtatgtccttggggcctccaactcaaaactgtatgtccttggggcctcgcagtaattttgtttcgttttctctatggggtggtcctctgtggggaaagtaaacgcagaggccattcctagacttaagccaaattcctggtgagtgtgctggctgggtgccaggaaagatgatccggaggtcattggggcccgcttctaagaaggagaaaagaagtggtacctactgtcttaggcaatgatgccatcaactcaataaccagtgcttctaagtgtgctaggtgttcgaggcagtctgtttcaggaaatcccgtctacttgctttggaaatcactggacctggaaaactttggcactctgggtatctaaagggccttttccaaacccagtctgggtctggatgtccgccacagttactctcatgttaagactgggtcttagccctagtatta

SEQ ID NO: 2266 - DNA, 800 bp, Mus musculus
tgactacactgattctactcctgtgtctaggcacctgttgcatactgctgcctttgcacacaattgcgggctgaaaacatgtatcacgctgaaaacaggtatacacgctggaaaaaacactccaacattccaggctccaagctcaatgttactgttgtttgacaccttgaaatccagtctgtccactctgtgaatattagtgtggtgcccttaggacagactttggtggctaaggtggggaactaaaacatgcaagttgatcagacttcagaagtcttaagttacagtgatgacacaggttctcggatggggagaggtcagctttcacaggggagaaggtagggaaagttagttgtcttagtctcttctgctgctataacaatgctacatacaacagtaaactatgaagaagtttatctcgctctggaggctttggaaagtagaataacatgtagtgtcagctaagtggcagggtaaaagcgccggaaactgtctatcattttttatcgggaacctactcttgtggtaacaatttgttcctggagggcggaactctagtgtcctcatcacctcttaaaggacccccttaggaatgttgcatgcatactgttaacagtagcaaatttcagggtaagttttggagggaactttgaaaccatgctaagagtccaaagcagtggatcaggcagtggagaggactttagaaaaagtgtcagtggggggagttggcagaaaagaaacaaaggctgcgaagaaatgaggtgatttgtttctgggcagttttctactcttcattaaaa

SEQ ID NO: 2267 - DNA, 882 bp, Mus musculus
atagggcgaatggtagctccacgcggggcggcgcggctcgaggtgatttaggaacatattactttatggcattaaaaagaaatggcttgattttgaacatataaaatctcatctttcattttctataatttactgaaatacctgtggatcaaaaccgaatatacaatacatgttatgagaacaaagttggcttactggttaattttaaaatacaaatttctgaagatatttattcaacaatagttgtccatttcaaatgtagacatttggaacctaactcgctgaatttcctctgtggacatctgtcactatcatgtagcaagtgtgggggtttgaataggtaaggcccccatagacttatgtgtttgaattacatagggagtggcactattaggaggtgtggtcttgttggaggaagtgtatcactgtgggggcctggctttgaggtctcctgtatccaagctccgcccagtgtggaacacagtctcctcctgactgccttccaatcaagatgtagaactctcagcttgtctagtatggctgcctgcatgctgccatatttccttccatagtaataatggactgaacctctaaaactgcaagctactctcaattaaatgctttcctttataagagtcgccttggtcataatgtctcttcacagtaatgatgaaattaagacagtaagtgtgtgtcttaatttttaattctaggactttacaaaacaggggtaaagacaaatgttcaaaaagctcttgagcacagatccagaatttacaaataacagagaaaactggctgagcttggagggttgggggtgactgggtatgtagccgagcttagccatcattctgatttgtatctgagaatagtgaaggtgtc

SEQ ID NO: 2268 - DNA, 680 bp, Mus musculus
gcagtgtgggcacaactggccaccaggagcacacatgcctggggaagaggggcctgctctgttgccttcatccctgttaaaattgagtatatgcaagccatttgcactacggaattgcatgccttgaaattccttactgtgtgcaccttagtttgaatttgacgttatgtagcatgcacaaaagaatggatgggcttgggcttgttcccaagtcacctctaccgctcattgggagcacagtgctgccctcagccaatcccaggttccgtggagcccgtgtggctccagcacttactgtgcagtggctccctttcccaccgtgctccctttcccaccgtgcccacttaagctgatggctcactaatttgcacaaatggaattgttatgatcacgtcttagcagtatcttgatttaaagtaagcccaaagcccacttctggagttccttacttaaaaaaaaaaaaaagaaaagaaaaaaaaagggcttgtgttaagcacctggtgttccgggtttttatcaagaaaagcttggagttcccttagggggatacgagggtgcttggccaacgggggcaattttatcccacacgatacatttaccagatgtgtctgtagctatgaaaactcgatgatttttttcccaataactcaatatcactgggtaacctctcacaatagatt

SEQ ID NO: 2269 - DNA, 858 bp, Mus musculus
tcactatagggcgaatggatctccaccgcggggcggcgcggctcgagtttcaataagacagacactttcctataaatggaaacattattttcctcaaggcaattattcaaacatgctccttatattaaggattctgtaaccacacttttgtaaatgccctctgtgtaactttttcctattacgcagttctttttcatttgatcttctgctggtgtaggggccaatagacttgtgaatattctctggatgtgtccatgtctaagtgtatatatatatatatcaatgtatatatttttttccagctaatacctcagatgtgtgattgtttaataagtaccatactgtttgcacagagcagggcttccattggtgggctcttactttaaaaattgaccttcagtcagtagaatctcatcagggtgaaatgttttcagttgctctccatggtttagtgcagattcttaccacaaggccctgtgtcatgtaaaactgtatttctctgagcctcattcagaagtggctcttggaatgacctggtgtagtaagttcttaaaactcggggtgactggttatcgagctgtccagtaaccgcatagaggcgacgaacacctgatacaagtgctggcaagtctcgctggtttctctgtatggttatgcagtactgtaacataggaaggcacttttgagtgacactgtagcgctttcatcagtaccttccgaatgaattgtttgtgacatgggtgtctacagtaagacagaaacaattggtgtctgtaatttatttggcattaaaaagtggttcatatttgctttacttctggtcttgggattgctatgtgagactttccatttaaagtt

SEQ ID NO: 2270 - DNA, 772 bp, Mus musculus
cgcggtggcggcgcggctcgagccctgtcctctagatccacttctccttttcccttcaaaacaaaacaaaacaaaacaaaacaaaacaaaacaaaaaaaacaaagagcaggcctcacagggatattaacagaacctggcataacaaattccattaagactaggaacaaaccctcatatcaaggctggatgaaggaaaagggccccaagtataggcaagagattcagtggcacctccaacccttgcttttaggggtccaacaaaaacaccaactatataactataaggcgtatgcagaggcactagctcagaacacatttagaattcctacattaaggcaagacaaaagcaagcagaaaaactatctgtgagagtgaatcagatttttttttttttaacggtatactccaccaccagaaaagtgctggaggctgagggtaaattgggggcttcataagaacacttaacacatttttataaataagagagctagtggagagtactgtgaaaaaaaatgcctggctttctccaaggaagactggtgctctttttacatgggtggcaatactctggaaaaattagaaaggtcaggtatcacaggtaaataaccacaaaattgaaaaatttagggaaaccagccacacagagggacagtttcctggtggaataaattggatgtgccaaataggctaactcgttagcattagggaattgaaacacttaaggtattcatggtagtttcggagccagtattactgaagacaaaagttatg

SEQ ID NO: 2271 - DNA, 757 bp, Mus musculus
cgcggggcggcgcggctcgagctgttcagcagagccagatcataagtcccaaactgcctttttgttttagctgtgtgtggttgcatagtcatctgcagagtcttcacggcacagaggtctccatgcacagagtggatgtcctgagaccctcacttatcgtggggcaatggccctcacatgctagaagaccacaccgagtaaggctaggggagatggctcagctcttctctgatactcttgggtctgagttcactgaggtcctgccatgaaatctcccttacctgcggcctcccttgcctaaggcagagccgtttccttcaggtaccacacaagcaatttgcagacctgactcagaaagtcctcttggtttgcaggtgacctcaaggaaatgcctggcgcagcctctggcatttctccacagccagctgcctcagtggggctcagagggtagggtctggacaggtgtctggtgcaggtctccttgcgcctctgtactctgcgctggcacattgtcatcctgtctccgccagcctggaccagcacctcagctgtcccccttgcacatgctctggcctgacttaagagttaagtggtcaagcccccagctcacttcaggtggatggaattggttgtcccctcctctctggacccctgcccaccctctggtggaggtgctaactagcagggacatggcacaggacaggaagctgggtgccagatgcttggggtctgttctttgccccacggccctggcatc

SEQ ID NO: 2272 - DNA, 732 bp, Mus musculus
ggctactcagtgcctgagtccccgaagttgttctctgacctgcaccctagcacatgcgccctcacacacaacatacaccctggtgtacatgccatcacacaacttgtgagtatatacaccacacatgtgccctcaaaacgtacaagtggatacaccattttgcctccttactaattatctgctgaaggtgtttaagatttttaaagtgtattgaagtggatcataaacctaacctagacgttaacttgtttctctcagttaatacttccttgataaagcaataacactgcttcgagtctgttgcctagtaaatagcatgtcatgatccttccggatggtgattttataggaaagttgtatgcacatcacccaatctatcttttaaaaaaaattaagaaatttaaatgtatgctggaagtaatgaccctatatgtggcattttattttaaaaaattggggaaaattgcatatttttttaaaagtagctgtttgagtaaaaaaaaaactgaaggtacttttttaaggaaaaaatttatatgccacagtttacatagacatttccaatatcagcatttactcttggatacaatggcttctttacttggctaaatgcatgtttctttggtcacaagtgcatctctgagatcttagtgacttcatgtttccttacattatccttcatatatgttactgtatctagaaacaatatctttcaaaaataagctgggcata

SEQ ID NO: 2273 - DNA, 821 bp, Mus musculus
ggtggcggcgcggtcgagggaaatgtaaaacttccccctagaaactaggtctgagtctagtattagatatgcaggtcccaggaagagactctcttcactcaagaagatggtcagcacctgggagaatctgcttcagaaacaaaggggaaggacttgaaaaagtgatgcttataaagtagcacagtataggaaaggacatttcctactgcaaatcacaaaagccatagtgaactaataatactgtcaaagaggtgtaattctgtagcaataataggtatggatggatggtaaattgtgctcacaaagctgtgtggttgagtggttactggttgagtttgtggggccctgcagtttattatagagttccacaaaaggaaaaacacatcttagttaaaaggcatttaaactatgaatgtatatgaatatatttgcgtgaaaaaataccaactttcatatatgtgttaaagatcctattttgtttccccagagtttacagctgttgaaatctttctagtacttaatctggaatcccagtgaagccaacatgtaggggtcttgcttaaattgttgtattaatagtcatttactatatagaatgatctatgctttattcaaataatataacctttgctcattgggttcctggctactgtttcaaagggaaaagttgttttgtgtgtgattagtgtgtctttgggataggggagcctcaagaacttactggtatttccttgtacttagactcaaggaagttaggactaaaagtgaacaaaatgactggcagtgcccaggcagggagttatctaaacatctggtaagtg

SEQ ID NO: 2274 - DNA, 573 bp, Mus musculus
cggtggcggcgcggctcgagaaggcaggtcagcatctactggcagattttctggcctactgactcatgtcacaataagaggaaattcacttgaggctcaaggcaaggggatgaacattctatgaatctcggtggaaggaacagggaagcctctggatgggtactgatatcctgtgtgtacatcagccattgtttctgataccttgtgactttgtttcccatggtactgaggaatataaggagacaaataaataaatacataaacttgaggctgatatgctattcccctgcatccttccccattctaatgtttgtctttgagtcttctttctgtctttcctataattatcctcactcccccttcagagtctggtctaacttgtgttgattggactggcatactctttcatttaggtagtgacttcactgaagtggcgagaatcaggtcttttcagaactagatcccttgatggggaattgccacacccactccagtggagtctcagtgacaagtccaaaaacatggccagagtcctgaggcaacaagtttcactgaaactggtccttggtatgc

SEQ ID NO: 2275 - DNA, 740 bp, Mus musculus
gcggtggcggcgcggctcgaggacccctgggacctattgggattccaggagaaaaaggagagagaggagacagtggctcacctggaccaccaggagagaaaggagacaagggtccaactggtgtccctggatttccaggtgtggatggtgtacctggtcacccagggcctcctggacccagaggcaaacctggtgtggacggctacaatggctcacgtggtgatccgggctatccaggagaaagaggagctccaggcccaggcggcccccctggtcagcctggggaaaatggagaaaaaggaagatctgtgtacattactggtggcgttaaaggtattcagggagaccgtggggacccaggaccacccggcttaccaggatctaggggtgcacaagggtcaccagggcccatggggcatgcaggcgcaccagggctagcaggacctataggtcatcctggaagccctgggttgaagggaaatcctgccactggactgaagggacaaaggggagagccgggtgaagttggccagcgtggtcctcctgggcccacgctgttggtacagccgcctgatttgagtatctataaaggagaacaagggtgtaaaaggaatgcctggaatgattggtcccccaggacctccaggtcgcaagggagcgcctggtgtcgggatcaaaggagagaaaggtatccctgggttcccaggaccccggggtgagcctggttcgcatgggcctcc

SEQ ID NO: 2276 - DNA, 809 bp, Mus musculus
gggcattgatacatatataaatatatagatataaatatataaatatatttttttaagtttcctacacctggacgttgcatggacgtacgccggcatgtctttatattgtatacagattttgcacgccaaactcggcagcttggggaaggagaaacaatgcctttctttcccctctcatgatgtttgcagatgcagaattttttctgtaaaacaaaaccttgaaggagaagaggggggagttgagtcttattgaacttattcttaagaaactgtactttttattgtaagaaaaaaggactacttacacacttgtcattaagaaaagtttacctagcacctttgacataccgatagagagtcgatgtatccatgtgcaagccccacattcacaccctactgcctgtctggcaagctggctaggggcattttcttttgttttgttggttttctccttttctctccccacacagggccaggtgcaccctgcctgctgtcaccagcctctggtcgagaacctgaggttctggtgagtccccgtctcagcacaactgtgctgatgggttccttccttcaggaagacacgggcgggggctgggtttccgagttgggcagtccaggcctttgtgagccctaggtctcagcgacacttggcactggaggaaactatttctccctctcaaggatccgggcgtgctctgcacccggccttggtggcctcaccggcctcacgttgatcagagtctcctatggaagagaagaatgagacagggttgttcagggttgtgcactccatgaggagatgccatttt

SEQ ID NO: 2277 - DNA, 783 bp, Mus musculus
  misc_feature (547)..(547): n is a, c, g, or t
caccgcggggcggcgcggtcgagaatgtctgtgggcagtcagttgttcactgtaactcatgaaacaggtatgctggctcgagccttaggtcagaactgcttttaaagattgaatttgacatggggcttgcccatgaggaagatgaaattcctttacctttagggcaatctcatgtggactgctttatttatgattagtaacgctgttttaagtgttaacccttttattgtattttatttataaaaatggctttatatattgagatatataaatataaatataaatctatataattgcctttatatttaggagtttgagttctccttatgtgagtttctgtgaacttttgtgccctgcacagtcaccagaaatggtcctagtaagtgtcacttccccaggaatcaagaggacataggaaaatgtgggggaggggtcaccagtcattccaaaatggaatggtgcgcatttgtggagaaacgattgtttattagccccctgttttctcatctgacctccacaacaaatagagtaggcatggaattcccgngcgacaagtgagctagagcctgctctggagcctactctacctgacccatcaccacgccccctttacctgctttctggaagtgttatggttcactctccgtggaaccagtccagaacgtgtgctgttgtccacccctgctgcagctggtggggcttccctctgtccacccgcatctcagactggcagagctctttaccaagtacttcatgttcgggaatctctccttgatactctac

SEQ ID NO: 2278 - DNA, 732 bp, Mus musculus
gcggggcggcgcggtcgagctctggagaggcagcgcggcctccaaggtgaccagccaggctttgttgctgtagaggacaccgtcacgtgtttgttctttggttggactctctcagacattagctcccagcagaaagcagccactgagcacggaggagagggcacccacactgctgccctgagttctccagtttgcagggagctcagcctcccactctatatgtatatactcctagctactgtggcttcgggtctctgtcacatctatctgtgctgctggtcctcagatcactggaacctgtggagagaaggggacctctctgcccagctctacaaaactttatgctgcatcagacatccaaagattgttccgacatgcttgcgggtgacccctggtggaacgagacatcaccagtgaggaatcattggacttaaaagtagacaaagcctggagcagaggaagctgtttcctgagtctgaagtggctactggggacatgtcctgctgtagttggttttcatggtaaagccatctgaggcctgaatattacccctatttttcataaacacaagaactctattttttttattaaagcaacaccacctttcacagtgatcaggtagtagccatgttttaaaggaaattcaatgttacagacagctgcctctctgaccagtctgatcctaagggtagatagaagatggtctaagcctacgcttgttacttaaacaca

SEQ ID NO: 2279 - DNA, 824 bp, Mus musculus
gtcttcactccatccccaggtgcttgttcacctcattaatgagcacctagagcaaggaccaaaagaaggaaaactaattaaaaccaatgcatattcatgccaaaacaagtggtccccaagcctgtttaaaaggttaacttggcccgaaaatattgcagcagcttcatgcaagaattgccacaggacactatggccttgctgggctagcatttgctgctgtaatctagttgctctggtatagaagagaaccccatggggctgtgggagagacaattcagtggcagcccactggcttctctacccattccacaggaaccctattcctacccccacccctgcccacaaatgccactgtgatccacagctgaagttgtttctaattgcctaaaggcagtctctgtgtctggagcttcaaagagacaggcagacctgcactaattcccttcttcctctagcagactgccttgggaaggaccttcagtccaggacagaccctgtcatggcttcttgctgtcttacccttctcactcaccaggcccacagtcgcctgcactcagtgctgtttgtaacacatctgttattctgcctacctgtactttttgctgcccatccctgttgcctttgagtttcttggaattgtggctgtcctcggaatctcttttctattcacagcccttctatagccttgctctgatggttttagcacttgatctgagagaagcttgcccataatttaatgcttcttttccttaaaaaataaaaaaaaaaatcaaaaaaaaccaataaagtgaagcatttcttgattcccttttccatgctggtgc

SEQ ID NO: 2280 - DNA, 726 bp, Mus musculus
  misc_feature (683)..(683): n is a, c, g, or t
gcggggcggcgcggctcgagattttcttcctccttaagactccctctggaggtgtggatgccttaatgcgcaaacacatttgaacacatggtgatacttaagctgctgccacaattacaagtggaattatgggctaccaaagaagcaactgatgaaaagcatgggccctccttcctcatgaccaaagcagtcttaattgggcttggagtccctttctcccagaatctagatggtcttcagattcggagcaccctcccctccccagttcccagtgttgccagtctctaagtcagcagggcagtgatgtcccatttgactctgctttctgtgtgcactgtcgccagcttgcatccttacaagcagacttcccggcctggacatgtcagcagttggaacggtactacccactgagacagtgtcctctcccctgcttcacctcagtcctcagattctcagttcagaagagccagttctactgacctgggggttggatcattagaagaaaaggagggtctgttcttatagaaagggaaatagaactggctggttctgttttcaaggattagagataggagggacagagcagtaacagtgttgtttgccctgctcctcatgctagtgaagttctgaacatgggactgtatgtcaatagcacaagcctctaagaccctcctgtctttttngggtcagagccccagaccattgcatcacagtcattcggcaaga

SEQ ID NO: 2281 - DNA, 675 bp, Mus musculus
ctacaacctgagaaagtaaccatatttaagggtcataggattcggtcgagaaccatgctctaaagtaaagaacatcaatttagggctctaagatacagtgtcgtgtcatctcttgctttttaagactgcagtgtgtggggaaaacatttttttactttaatgttctggcaatggctacatctggcactttagggggaaaaaagtatattaataattttgtctctctttaggaataagacatagaactatttgtactgtgaattatggacactctttgaaggaaagaaatattaattccagtgtttttctgaagctctggaaagggataataagcaagaccccgtggaacacgtacaaaaagagaaaccagacaaattctattttcttacccgagcaaatattttattgagactgcttatgtatgtcaaaggagcctacaacttcagctacacaactttctgtattgaaagaactcgtacttttgtagcttttattccacatttaatttaaaaatgactttgtaacactaaagtgtctagcaaaagactttattccagatcttgaagaaaatttttagtttttatggaaatggttcagtggttcagcttctcaaagctgcggtgctcctggccctcctggcaccatgggacaaggacaaccacgtgacaacatatt

SEQ ID NO: 2282 - DNA, 778 bp, Mus musculus
  misc_feature (665)..(665): n is a, c, g, or t
atcactatagggcgaatggtgtcaccgggtggcggcgggctcgaggagaatctgttaaaaacatagatagtgcaggaacttgagacggttgccaaggcccaggaacaaagaattgaacacgtctttccctttgtattacaggaggactgaatgcacataaaatgtctaatgtggtgagcactgcacctcagatagcgccctactggtcaagtctgaagtcctaactagaagtttgctaattaactctccagagagcccattttactgcagaaattacgggtcaattaaggaagccatcagggtgggcgagctaacctcttagacatttagaacagctctggcgatgtttattcccagggcagagctgcctgtgctttctcaacgcagagcagccagtagtggatcttggttcaggaggttggaaggctcctttaaaggacagaataaaggtgacttggtccatagatgaacaccaaagacactttcatgacttagccgagccttggagtgtgtttgctgtgatgtgtttcccgttgagatagtggtggtttttcactcacctcttggatctaacaaggctcatttggtcacaccttgtcactggccccactgtgtcctctctactctaatgtattttgctgccttgggaccccagctctaagagntggccaacactgccagttataagtagtcaaatcgttttctacaataagaaaggacagatgtcaccagtcctacctaaatttactatgtctttcccagtgacatttagttataa

SEQ ID NO: 2283 - DNA, 708 bp, Mus musculus
gcggggcggcgcggctcgaggcggctcgagatttttttcccttttatagttaaatgaacctcttccttttttacaatgtgtgggtttgtttgtttttagtagaaggggaaggttaaagtgttgtggaagagaggatttttaggcatcaactgggagatttttttagcatattcccccactaaatattaaacacaaacatctcaatccctccacgtgtcactgtgcacacttagagcatcaaggaatcagaatccgacagcctaatccacttgattttagagaagttcctgaaatttctatttcctagacttttttattgttcttattttatcacagtgaggtgagcaaggcaagttgcctcgttctcccaactcggtgcttctgcttgtggggtgggggtggggcggtatagacaagggtgcactcctaaagctctctggtgctgaagggcctcaaggttgagtttctttcagaaaatgtgtatggcacactctcaagtgcacacgtgaacggtgtcatgcgcactatttttaaaggacaagggaaggggctctgaagtgggtttgctttctctcatgacatttgatttccctggtgccttattcctattctatgctggcactcacatgcccacaggaatacacgctgatgtcagccccaggagtgaggacctctaggtgacagttgagcatgtggggaccatcggat

SEQ ID NO: 2284 - DNA, 707 bp, Mus musculus
gcgcggtcgaggcaggctgtagggcatcttcttagtgatggtgatggtgtggaagggcccagaccttaggggtggttccaccgtgggatgatagtcctaggtagtataagagagtaaactgagcaagaaacattcctccatggcctcttcagttcctgcctccgggttcctgccctgtatattcctggcctgtaatgtggaactgtaagccgaaataaactctttcctccccaagttccaaggtatgtgggggtaccaccaactgaagttgatgtaatataatttcattacctacttaataagcaggctggaatagaccgaagcaattttagattttagagtggagaagccatccaatctgggaggataccagttctctaatctccaggtttctctgaagcaatatcttatttacaatatcttcgagcacctacctcaagactggctgatccccacttccccacgtcttccttccgtgttaccttccacttgagtaagaaaacaccacggtcttcagcagtatgacagtgaatgacttcgatctttttctaattcataaaatgtgatgaagtaaagatttaaattccaaaatgctacatgcctgcaccaatagctgactgactgtgcgcctgcaccaatagcaggtcattccccagtccatcatatctcccatctgttgtgggcttatcttaagtcaacagaattct

SEQ ID NO: 2285 - DNA, 770 bp, Mus musculus
ggagcatgagccacctctgaaaggaaatacacagcaaattcaaaaagagattcaaatgtgtaacactgtgggaaaacatatctatgactggggttgtagctcagttggtaggtttgcttaacatgcaccaagccctggttctgtcttctgcattgcataaaactgaacaggttggcccaggtctgcaatcccggcactctggaggtggtggcaaaggagcctacattcaaggtaatcctctgctatacaatgagttctgagccagcctgggctatatgagactgtctcaaaaaataaaacaaaataaaataaagcattggttagtaattcaaagaaagcagatgtggctgaaaccgttttccctgatcataatacaacaagcaaatgaaagccagaagaaggctcctgtgccttgtgtgtggcagtaccaaccattgtgagagatgcctttggacctggtagtttgctgtcttagaaatgtatcctaaaataaggatttggttataaaatgttcatctcagggttgtaatagagaacaatggaacgcagctgtttgtttggaagtccattccttttctgctgtcatgaaaatgtatagctagggcttgcctaagtaaattatattcatctgatggtggtgttctgtgcagccatccaaagtcttacagaagaaaaattgagtggaaattataaatattgaatactaaaaagattataaaagtatgagttcgtgactgtttttaaaaatatgaacacatacttgttatata

SEQ ID NO: 2286 - DNA, 814 bp, Mus musculus
tcgagggacactcttcctctgagatctccagcttctctgccttctgtgtttcttttaaactctaacaaaaactgttctcaccttcaaaaaataaaataataacaagctttccacatccccaccaaagagggacccagctaggtttctggaaacccagcaccagcctccagctgcccttctgcaggtttctgcctctgtttccctttcgtttgacttttttccttcttttgagacagagttccagcatggagcctgtgcaggtttcaatcccacagtaacaccttctgcagcaccccacctgctcagactgcagccctggccaccaggcctggctacctggacattctgtctgccctgcactctcaggaaaccttggcctctgctactgtctgtttggctcattcaaagtgtgtccttaaaggaatgcagtcacccatgccagaggcagtgtttacagcctggaatgctctgcacttccagtggaccagtgctccaccggaagtgggctgttagcagggtcctctcacctggccctggcctttctgtagccttgaatcctgccttccccaccagggcaccaggatgagtgcagcagcaggaggagaggcaaacagtcacctcaggaaccttctgagctaaggcacaccctctgtgcctgtcaagcaaaggttgtattggatatcaagtgtttggtctcacgccaagccaacaggctttggagagaattaattagttctcctactcagggatttctttcagtcctaacacagctgtgtatatttgcttcacccacgcaatgctggattatttaatt

SEQ ID NO: 2287 - DNA, 752 bp, Mus musculus
tcatatagggcgaatggttctccacgcggggcggcgcggctcgagggtaaatgtaggagcctgtgggctttcactccagtctttattcttggctagcttcccctctgcactgtggaaaggagcaagtaaaattgagatgtggcatttcagagattgtcgtgactttatttaccctgtgttcctgagtatcaggaatgtttgagtggtttgaagagcagatccgatataatctctggctgacctaagttagtctgagaagcagtcttctaagataaacaaacgctgcttgactcttggtggccagcagcacagcatgtttccttttctccctcccctctgccttttgcacgctcatccccagtgttgcagtgtgctcgtgcacaaacatgaccacactcatcttggcccaggagtggtaggatcttcttttgttggttttcattgttcttcttatgtgtttgtttgtttgtttgtttgtttgtttgtttgtttgctttttaagctggggaccactgacctaactctatatgcaccccaagttccccatggaaaacgtttcaacatgcaggacggaaggcaccagtacagctcaaggccacaccgtcactttccttggggacttaggctgatttgccccaaattgactccagcctgtatcatttagtacaggcggctcccgcgggtcaatgctgacacagtggagagcttgacacctgctgacagtgtgtgcctctgttccaaagggttgaatc

SEQ ID NO: 2288 - DNA, 666 bp, Mus musculus
gcggtggcggcgcggctcgaggcggtcgagcacgtgtttacaagaagctcttaccctccactcaggccgcggctctgggggggcggacgtgtcccaagcttgtgacagcagcttggcaatctcagatccacgaggtgctgtctggaatcatgggaggcactggcagtgaaaggaaggctttacgccaaggcccaagacaaagctttagcagtgggcagactcactggaaagccgcccagttctcttacctctacttcctgctgtgagggacccacccaccgacagaagaggaagggttaggaaagggttggatccatcaaaagtacttgacctcaagaaaccattagtaatccaaaatgtttaaaggaaccaaaggcatcgccaggtatttgccaaaagcagccacttttaaattttgagactgtgttctcaagtcagaccccaaaaggttccatctaaggttataatttccacagagatgtagatatttcttacttgttttcctgtaaaatagcatagagctgtttgtggtttaagaataacattcttggtagcaacgctgaattattttcttgtttgtcaaggttagttatctgttgcttgcaatggacacgcaggtgtttttcttcttttcatcttcacataatgtcttagcatctcacttcc

SEQ ID NO: 2289 - DNA, 560 bp, Mus musculus
agggaactcagccaacatcaagtagaaatgtccgaatctttttttaaaagtagaactgatgtggtccttgtgtgtgcatcagaaagagtggggttgattgttgagtctgctgaactcagctaagagtgtctaatgacaagcttcatatctgtgtttacattccctactgtttaatcctgtcttacactaggacagacatggattaccaaactgggcaggaatcttgttctacagtatgaagtgtaagagtcagaaggaagcccactgtagtgtagttctctctctctctctcgttagcacttagaacaagtctggagagacttgtacggctttgcacatctctactgggaaagtattgatgacaatgaacagtggcgaatatgctcaagagctccagcatatgtctgtggttcctgtttaaattcaccacactgttgatggtcacagttttcactgaggggactcagttgaaggggatgaggaggaacagccattgctacaggagtcgagacacagctacatgtgatgaagtctaaactgtttctttcattgtgagatta

SEQ ID NO: 2290 - DNA, 791 bp, Mus musculus
  misc_feature (665)..(665): n is a, c, g, or t
accgcggtggcggcgcggctcgagggcctgttcaattttacaaataacacgttttgcttgtagtcaggtaggtattgatggttggtgcttccgttagggaacatatttagatggccacttaatgatgaacaatgtaaatgacaagcatatggctgagttgcaatgatgtcatcttactactgaaatgggctgaagaaagaaggtgctgaggtggctgtgattacatttaaaaatgacattgtttctctgtttccagggtgctgtgacaacatgaagagttcgagctacctcccaggatgagtgcaggttttcctggtgacaaatctcaggcattcaaaggttagttagattatttcggatggggttcgttcactaggtttgctgtttctatgatgaatcaaactagctcactatgactgctaatgaaaacacaggaacacctgagaaaccaaagggtagtgtgggggcaagggccttatatccagccttttcaaggtttgttatttttctccaggttctgttagcagtgccatacttgtgggtttacaggtgagtgattccagtgtgtggtgtggtgtatgtgcatagcattggactggggtggggggacctaactgagaacgtactttgtgtatatatgatgactttcatagaatctcgttcgngtgatgattgctgttgagacttggaaatctgatttttctcagaatgatgggttagataggaacaagctgttgcaggatttttaacattgctgatgactgtcttgtttttcagagatggtgtgtctg

SEQ ID NO: 2291 - DNA, 814 bp, Mus musculus
gcggctcgagacggagtggaactaagcaagtttctacaaaacagagagaaatctgaacagccaggtcgcgtgtgtgtatgcgtgtgggctggcacgattccgggtctctaagaggtctcattggaaggttccaatgcctgcgtcacagacaagatgtgtggcccaagtccgcggtcccatctgtgaaacggaccgcctgcagcaagaggtgcccagcaacctttccaggcacgttcccaagcctgcaccccaaaaggtcacagtgtcccgactctgaggccgagttgaaggtcatcctccccggctctaccaggcctggaagtggacgccccgaatcccagacagtcccataaacctcccacgcgcgaccacctactcacgtggccagccgcagacccgagccggctctgtgggaccgctggacgctgtcatgttgagccacggagcttccggttacgagtcgaaggtgacagcaaatcagaagagcctgtgacgataggtcccgccctcaggaagagatccaccaataggaaggggggagacgctggtttctcctcaggagcaggccctgcccctcactgagctccagaagcctggagactttggataccagtacggaggcgctggagcgggttccccggcgtccgtccggtccaactttctccgcggtgtggtaaattattattattgttacggactggaagcaccacatccggttcggagcccagggcggctttgcgtgctaagcaagcactctactgctgtcaactaagccgcagccccagtcccggaatgcatttttttactaaagagg

SEQ ID NO: 2292 - DNA, 674 bp, Mus musculus
cacatgaataattgaagtatttgagtaaaaaaggaaaaagttttaatttggatgctgttcgtgtatatatgtgtaagagttggagaatcatgatgtgatacaactgtataaggcaattaatgtgaaggattcaggggaataaaacatcctgaggggtgaaaaaaaaatctctccatggagcgtcttcacatatggcttactagggatttataaggttatttgtccaacagtcagaattccaagtaaaagccacacgaccttagagaagcattcactcttcgcactcatctccatgtatgtgggtgcgcatgcctgccatttcctccccaaaccaacagtcattacaacaacaacctaattttgtgccagtttctttttttcttgaggcctccaatccttcaagataaatgtgtaccagcacaaatactgcttcctttggtcccccagagctgtaaatacttggcatttgggatctaaaagacagggaatgctgggtttccttagttggatgctattcttatcctttgtggaaataaaaaagacagacgtaaaagaaaaacttaagtaccagtattactgttgaaaattaatgtagaattaatttttaaagcgttaattttcagtaacatctcaaagcaagattaaaaaaaacaaaactgtgatcccaagggaag

SEQ ID NO: 2293 - DNA, 867 bp, Mus musculus
gcgcggctcgatctgtaattattctcctgtctccaccggtgcctggatccgtgattcttaactgttctcaatcttatataagcaacaagtacttaaaacttagatgtaattgccagaagattctgaggattttttgctgagaaaaatctagaagctcttagtaaccaaggacccttgacttcacttctctagactcagcagtttcccctgcaggagcgtttcccaggaggcagtagaacccactcaccacattttcacaggagaagaggcagccaagcccacactagaagaccgggagttgatgggtttaattccatgcctgtggtttgaggtaggcaggttgaaacatctgtactgaccagaggcagagtgcattcccgttttccctcagtacttgatgttgagacaagtgtgcaggcacagctgtaattaatgcaggccaaccgacacttggagggcagctttggcctagacagaagccaagtcaggtgctcgtgggaaacttcttagtcggtgatcttggtactacgagctctgagtgtgttccattatttcagtttttgaagtgtgctttgtgagtccccttttctggtttataaccatctctcctgcctggtatgtttctcgaggtgtgcttcatggcggagcagctctagttgtgtaaactgacatcatccttcactgcaattccgtaatctcaagtcaatctgggaactccgtagtttgtttggttttcaagtttggagaggaagcctcacttaaatcctccagccacaagttgacttagtagttttgtgtaacctgttctgtccggtagtaagtagttctcttgattaggaaaaccgtcctgggagtacattctgttat

SEQ ID NO: 2294 - DNA, 804 bp, Mus musculus
aggctatataggcaagctgtcctagaactcatggatgatactgcctatatatgccaccatgcctgacttaatgtacagcacttctgatccaacacttgagggaggtagacaccaagcagctgcactggggatcctgacgataaagagggctctaatggagtctttcctatagttgacacatgtcatgtacatacagattctcagaatggggcttgtgtcaaagagtgagtggtcttaaaagcattcagaggcaattactaggcttctcttgaaatttgaaaatgttaatactttaacctgatgtaaaattagtgaaaatgtgtgagtttaataatttcttcaaaaaaatcaaatgatagttggaagggaatcactcaaatgagagaattttaatgggcactataatgagattgccataattttttaagtctttgattaagagcaaagaattatcaaaaatgggtgttgtcaagaagtctggacaggtgcttagcagtcaatcttgtagcccccagctgcctataacttcgactccagaggccctgatactctcttctggtctccacggcatcagacacacatgtggtgtacatgcctgcaggcaaaccactcaaacaaaaaataaagatcagtctttttaaaagacgtgttaatggtacaaatgtagttcatttggtagagcacttgcctagacacatgtactgtgccctgggttccatctctaaaagttgtatataaatgacacatgtgtcacccagcatttgtggaggcagattaggtggatctcggtgctaagagtgagta

SEQ ID NO: 2295 - DNA, 820 bp, Mus musculus
gcggggcggcgcggtcgaggtttctcagactccaaagccaccaggcttccggaccccttctgtcatagaagcaataaccataacctaatactgtagagacaagtctggcccaagcagatgctattccagaaactacctgtgcatgtgagatgctataaaggactgacatccaagtcccccatccctcccagaaggcctagctctagcttcttggttcctacagccaggattggtacacacacaccccgccctccaagatatagctgagcggactgagccagccaccagtcctgggccccactattgtcactaaggaataaaggtgagggcagccttccgatccttatatctatacctatccttgaatcgtgatgttttatgtgactgagggtcgtgatggtttgtttcagtgttgcaacattgaaaggtacttgtggcatattccaggtggcacatctggtgggaaaagggcacccccgagggtatatcaggaaagagctagaaagggctgactgaggattcaggctgtgggcttggctggcagatatgagcggcttccagagagctcacattgtatttacacgtgagctgaaggactcttgtaccactgtgctaacagcaacccgctgagactgtgcaaatgacttgctttaacggggtgagtaagagggaaacagtttggactgtggaataggggaagagttcactcaagtctcccagccaccctcagcaggtaagttctaggactctccaagtcccagggatcttttacaggctgtgcagaacttctgtcagtggacgttggaggcatggtgtatag

SEQ ID NO: 2296 - DNA, 747 bp, Mus musculus
cacgcggggcggcgcggctcgagccgtcacggctgtggatatgcccgtttggaaaaactcctcctttgccctcctcgttttatgtaataagcacatgtccctgccacacctgtgctcattcctgatgtatttaacagggaccagacaaacggtgtcttccaaatacggaatgcgcattgatgtctgagatgaccttatatgtggctctaagagaaggaattcgctcagatgatccaatattcaagtgaaatttataaaacataggcactttatttagtttttacagttcctgtgccctcttgtctgcgagcatgctcagtacttgcgtgcccctcttgtcccggagcatgctcagtgcctacgcctctctctacatgtgcagtactcgatttgccctcatttcatgctgggtccggtgttgtcgctactttgtccgacattaccggcttgtctcattaacatcgaatgcattgtctagacatctgtcttggaaaccagtccatctcctgatcagaaaggtcagagttctggatcactaatttatttggatttatatttttctgagccactaagacaaatgaagagggcaaaataaataagtttatgataagacataagtcaagggctaacaattattccatatatgttggtcctgactgaagtaatgacgttaaagtgtttgtggatagtagttattgactatatctaaaataatagcattaaatctaagttatattttcagaatcc

SEQ ID NO: 2297 - DNA, 782 bp, Mus musculus
cggcgcggctcgagggttgttcgtgggctgcgggtgggcagctaggtccctttcctcacacaggcgaacgctccgcacgtggacgccgtgcgatctgttcaagcgtgtaagggagggcggccacaatctttgtttaacgtaggttaaaggctacccgggaaggtgggcgagaagcctcgaaggcacgccgtcgttgttggtggcggcgggcgcatcctcctcggtttccctgagaatcccgaccgagccgcctttcccaggagccgagacccgggcctcgtcgggtccccctcccgtcgcggccaaacaaaagcctcctgcctcagtcatgaagaccgcgaagctgacgtgtgtgcgctagtctgggtcgggctttcctcgaacagccatccccggggccctcttggatgacaaggctgctgagcaattgcgagcacgcgagaccggagagaaaacttaagatcgcacacgccggcctgctgtgcgtgcgcgtctcctgctccgcccgcacctctcctggggagggttttattcacaaaggcccgagggtctttgcagggcctgttaaaggagaactgcgacgcagtgtagttgcttctaggtatggagtgtggtcctagctcctcactcatcgaatagagacagtcccgccagcactgcagtttcctaaccactttaaacctctttaaaaaaaaaatctcaattggttgattcaggcaaccaggatagggaaggggatcccctacaggctcagcgacttgggtgggatttgctaggggaga

SEQ ID NO: 2298 - DNA, 719 bp, Mus musculus
gcggggcggcgcggctcgaggagaaaccctgtatcgaaagataaaggtgtggtgtggctagggctgtagttaacagtacttgccctgcttacacggggctcagtttcccacctttgcatgacctgaaaacaaaaccctttgtagatctctttggatgactaccactttccagggcctggggatgggggatgggtgtggaggcagtgatagttggctggcacttggatgctaggcaccaatattctagatttggacctttaaaactgagttcatgcatgcacaggtctgtggatcacagatgtgatggggtctggagattgaaacagggtcctctggaagagcagccagtgcttttaacatctcttcaggccacatactcagcttttaatgataagtttaaccgctgaataatctctccaggccaattactcagcctttttttgttaagtttgggaacttaaattcaggtctttatgtttgcccagaaagctctcttacccactgagccattccccaacccttgtttttcattttgagacagtctctctaccctaaactcattctgctgtccagggtggcctatgaacttgccatcctcctgcctcagtgcctcttgagtaggtaggtaaggttaaaaatgaacagcactacccagctatttttttttcttttagagtgtgtgtgtgtgtgtgtgtgtgtgtgtttatacaggcaattcc

SEQ ID NO: 2299 - DNA, 722 bp, Mus musculus
  misc_feature (554)..(554): n is a, c, g, or t
cactccaccaagagctacacagattcccacataaagatagtgccctaagttgtaatcagaacacttgagcaaggagttaaatggaggagtaaacctgggagtgcaagaaagctcaagaaacactcaaggggaggcaggggggctttaaaaacagacttcagcttcacagattcaacatttcactgagggaagccctgaaaacaggacaaagtgctctgcagtgtcctcatgccctattacattctcagcccagtgggcctcagctgcctttggtaggttccatcccttagccattcccacccatctgtaacaatgatctgggagctcggctccaagcatccctggttacctgttcagcctgcaaggccgatgtatagtgtacctcaattcacacgacagcgacagccatgctcctgccgtacatggacatctgttcaacgactcatatttcaactgtacccgagaggctagctatttaagggaacacagaggtaaattcttttgtaaagaatcctttgtaatgcaaaccaattatccctgaaggtatctggttntgtaagtttggatttctgtatatctggctttatcttaagcttctctactgaggcattctgagtagtggccatcagagtctcctgcctgcccacagagcagagaaccagtgcacgctcttaagagaaactacttggccaaactggcaagacgcagcaagcagcagcagg

SEQ ID NO: 2300 - DNA, 756 bp, Mus musculus
  misc_feature (214)..(214): n is a, c, g, or t
gcggtggcggcgcggctcgaggtcgtcgggacctggacacacaggaaatgcccttttactaaggttctccagccggacagagcatctgcctttagtagaaagggggtgggcaaggtggacttcaccgtggccatgaccttctgaatttgagaaaggaaaatggatttcagtggaaaggcaatccaagttctgctttctgtcttttctacctccntgtttgttttgcgttcgttcccccgtctccccttaataacagcaatggagaaggccctttcgtaacaggcaataaacctcggtccaggttaccaaggaaatgaaggctgcaatgcacggatgtatttggcagcagagccttgggaagagcccacggggctctggagatggaagcaggctgagactggctggggacgaaccaggactttctccttcccagtctcagtccacccacgtgagaggaaacacctaccttcgtctcttttctcagtatcccagcccacggtttacaattttgacacatccaaatatacaaaaatagaatagaaggcacattatctggaagaatgttcgtgaataaagatgctatatgaagggggtttccagcatctgaaactgcaaagaaaaggacaacatcatttccgaaattaagaatcaaatttcgtgatactcatggttcagtgccttgctcagccgtcatcgtcatcgggaagctttgtcctgcagcagacaggaacaaatgctgagacgcacagtcagact

SEQ ID NO: 2301 - DNA, 572 bp, Mus musculus
agggcaatagacttgtgaatattctctggatgtgtccatgtctaagtgtatatatatatatatcaatgtatatatttttttccagctaatacctcagatgtgtgatgtttaataagtaccatactgttgcacagagcagggcttccattggtgggctcttactttaaaaattgaccttcagtcagtagaatctcatcagggtgaaatgttttcagttgctctccatggtttagtgcagattcttaccacaaggccctgtgtcatgtaaaactgtatttctctgagcctcattcagaagtggctcttggaatgacctggtgtagtaagttcttaaaactcggggtgactggttatcgagctgtccagtaaccgcatagaggcgacgaacacctgatacaagtgctggcaagtctcgctggtttctctgtatggttatgcagtactgtaacataggaaggcacttttgagtgacactgtagcgctttcatcagtaccttccgaatgaattgtttgtgacatgggtgtctacagtaagacagaaacaatggtgtctgtaatttatttgcattaaa

SEQ ID NO: 2302 - DNA, 777 bp, Mus musculus
ggtggcggcgcggtcgagcaccagtatgggtaccagattcccaggctccaaactgcatgaagtgtgaagctcggtttacattcaccaagaaggaggcatcactgcagagcgtgtgggaaggttttctgtgcttcctgctgcagcctaaaatgcaaactgctgtacatggacagaaaggaagccagagtgtgtgtaatctgtcactcagtgctgatgaatgctcaagcctgggagaacatgatgagtgcctcaagccagagccctaaccctaacaatcctgctgaatactgttctactatccctcccttgcagcaagctcaggcctcaggagccctgagctctccacctcccactgtgatggtacctgtgggagttttaaagcaccctggaacagaagtgcctcagcccagagagcagaggagagtttggtttgctgatgggatcttacctaatggagaagttgctgatgcagccaaattaacaatgaatggaacttcctctgcaggaactctggctgtgtcacatgacccagtcaagcctgtagccaccagtcctcttccaacagaggctgatacttctctggtctctgggagcattactcaggtgggaagtcctgttggaagtgcaatgaaccttattcctgaagatggcttcctcccatcctcatctccactggtgtgaaaggagattatgctgtggaagagaaaccatcacagatttcagtcatgcagcaacctggaggatggtggcctgaccacttgtcttgttttaaatgca

SEQ ID NO: 2303 - DNA, 730 bp, Mus musculus
acgcggggcggcgcggtcgaggaatttcctagagtctctctaccctcactgccaatttcatgtttacttaaacagccctcctagcaacatagttgaaaatacctccatagagaaaataaaagacagaaatacttgtctggaaatcaaaactaatagataccagagttgaaaattgtctctgaaaattgtcatctcttcctctcttgctaacctaacaccaatactttttaagaggtagataagttggatttctttccccttaaacatgcttttaaaacaaaatatattgtatttattagtatttactacaaaataaaatacttgctagaaagttccacacttgtggcttatcaaatagaaatcactgatttttttgttgttgttagttttttttcaagacagaggtctctctgtgtagccctggctgtcctggggctcactctgtggaccagaggcaggcggatttctgagtttggggccagcctggtctgcagagtgagttccagggcggccaggctacacagagagaccctgcctcaaaaacaaaaaaaaaaaaaaacaaacaaagaaacaaatacacacagatatatttccgtctgattcttgtgcaaaatctcaggtgtttttctagaaattagaggtgaaattatcttcaagtttggtatgttttttgtaaaatttctctaagaaagtaccaggtgacaagtcatcgcagaagcgcaggctttgt

SEQ ID NO: 2304 - DNA, 616 bp, Mus musculus
  misc_feature (437)..(437): n is a, c, g, or t
cgcggtggcggcgcggctcgaggctttctaagtgaatgagggaaagactttccccagagatctgtcaaggtcatgttagggaggggcctttatggccttcatttgcacactgtagactttgcttgtgacaggtgacctaaaataagctgctctggaaagtctcagagcttatccctgggagcttctcaatggcagttgggctccagggaccaatagacctgcagaattgcaggagagtggggattgctcagcttagcaagatgactggccaaggagcagaccagctgtatttaaaacccagcaggcatgcccaccacagctcccagtcattcaagatagcaatgaatgtgacccaacagagagtcacaattacttagagcattatgagacttacctttcaatttttgaaactcagttgtgtcattcttgagcatgangtttgttgataaccattaggcccagacaagtcaagattggaccaacaccggtggggtgtaatgttagcctgccttctctagccttataaagtgggttctatctctgcccaactcctgccttccatcctgttgctgaaactggaggatggccctggctcatgggaagtttggtgcctttg

SEQ ID NO: 2305 - DNA, 426 bp, Mus musculus
  misc_feature (250)..(250): n is a, c, g, or t
tataggggaatggtttcaccgcggggcggcgcggctcgagctttagtcaagcaacatggcgggagagactgaaaatgaagtagaaacatatctatctgcgagagcttctcacttaagactctccctaaaatcctgcctctgcacgcccacagaacaaacccgagaaggaagcagcgccttccactcgtgttctaatggtgaccacgccacacgcagaccctatgttggtataagtctgaattctgcagantggttccatttcaccggctctcaagcccaacaaagaagctctggaacagtcacaataaggactagcagagggatcctgtcggtgttaaactgtttacatttctttatatacaataatgtgctttcagtgccttagttgtgggtccctttctttttcctgttctaagaattgtatac

SEQ ID NO: 2306 - DNA, 620 bp, Mus musculus
  misc_feature (398)..(398): n is a, c, g, or t
ttccagctgtttttttcctagcgtatacataggtagagctttcaccaatgcctaataaagaagctgaaatcaatttctaattggtagattaagactgacatggcgaggttcagaaaattcacaactttttactagactcctgtcaattaggaaatctataactggtccccattagccaagtaatcttctgttgccataaattggggacagtccatttctagcgcctataggatcacccttagtctcggtgggcattctgccccccagaccacagacacagagcagtcaacatcacctgaaatcattgctgacctcctcggtccccaggccaaccgccactctcccaggctgctctcctgagggaacctggttcctggtgataggagctgggctcgctntggtcttcattctggcctctttagttttcctaaagcacaaatccatgtagtgccctgttacctctccacacccattccaggtgacctggctctctcccgcagcctcaggcagaccttcactatacctgagtttgcaacttttcccccactgccgctgccttattgaccaggctggggtgggggaggggccagctcacctccctccttttcccaggtagactc

SEQ ID NO: 2307 - DNA, 123 bp, Mus musculus
gcggtggcggcgcggctcgagtgagccttgaagcctagggcgcgggcccgggtggagccgccgcaggtgcagatcttggtggtagtagcaaatattcaaacgagaactttgaaggccgaaaaa

SEQ ID NO: 2308 - DNA, 520 bp, Mus musculus
  misc_feature (53)..(53): n is a, c, g, or t
caccgcggtggcggcgcggctcgagaggatgcaagagtgagccgtaaccaggnaacatctaatgccttccgcagcagagcagcaagggtgcgcagagccattcaaaccaggcacctggagccctgcaaaggtcggcgctatgaaggatgtctggccagctgtttgaaatggaatttgcacgaaggttttccaggaaggacactaaaagctgatcacaggcttgctgtgaaatcatcaaagagaattaaccactgaagatatctggaatacagtctttatataactcccaactcatcttttcctgtgacctcatcgactggtccttgtcacatcagaccatcaccagttatccgtcaactccgtgctcactctgactgtgtattgacttggacctggcaccggacttggttctgaggatacataggccaagggaagacctaaagactactactgtagagaaggatggtactgaaggatgctactgtgagaaggatgctactgtgagaaggatgctactgac

SEQ ID NO: 2309 - DNA, 852 bp, Mus musculus
tatcaccgcggggcggcgcggctcgagctcgagccgcggaaacttggaagaagagtggtactgtgatggtacctgatggagtggtccaaattcccagttgtttcctaagtgggtgagctctccgttttagtattctaaagatgttaacgtgaacttggcaatggaaaggggaaggaaaataatatttaataaaaatcagtgtctactctttccctttatgagtgtgtattcctggttgtatgaagagaaactcatgggttttgtgttgccatgtgaatgtcgagagggatgcttgacagcatgttaattgaagccagagcaagtatgtctgccgtcaggtaatctggagatgccagtgtatgctgagggagtgattagctgatggctataatgaagtcacttacaaagcagaaaggctgtctggccggccgaagaacccaaggaaagcagtgcagcagcctcactcacgtaggtgtgatttagggttctgaactggaaactgatctgtattacctgactttccacaactgtccattttcttatcagaccaaagaacaaaaagaaaaaaaaaacatgaaaaagcgaagtaacacacctttaccggtttatgtcactcaggtacaatttcgtggggaggttaaggttcgtctgttcgtaggtatgtatgtctgatttctgtactgctcagcatattattctgctgtcgcctctgtcctccgtggggcacctcagtttagggtgctactcctgggatctctactgctgttaggtgaatgatgatcggatgaaagtgaccattatcataagggcctctttgtaaaaaaaaaaaatttgaaaaattcaaaaaaattt

SEQ ID NO: 2310 - DNA, 826 bp, Mus musculus
acttggcgttatcgccccagtcccaggatgacacctctttatctgactgtgtgtactgacaaagacataactgagaattctttgagttgcagacctaagatttttcatttgagtacaaaaatatgtctaaaaatgttttccctgaacataagtatattggatattatacatagaaaaatcccaataatatattttatagtttcatgacttaaaatgcatttttatgatttctcaatagtatataaaaatgaaatgggaccctcccccaactccacaaactcgctgacttctgcaagtgactaaggaacactgtacacatctatatatttcaccaccccactgtctcaattgggcacgcagtattttagaatatttattgcctgccttgttcttccatctactttaatctctggtgcagacaaaactatagattatggaatattgttttactggagcctggtcaaagggctccatcaggcacatttctctgacgttcacatgtttatctgagatggaagtagctaatccaactttattcagaattgcggccttaatctaggagaagaggaggtcagggaaggctggaaggcacagcgtaaacatacacacagcgaatgtgaagcaagggggtctctgttacaagtgatggagaaacctctgctccgagtactgcggacagtctgagattagtgttggtgctctagggccaggacaaagctgggctgtgtgagaggggtcaggatgtttgctcgggggcactccttcctcacctgttgacagatttagatggtgcaatgtcaggcctggctaaccgctctgagactgt

SEQ ID NO: 2311 - DNA, 776 bp, Mus musculus
cgcggtggcggcgcggtcgagcccctctggtggtaactagtactccaacacaatgtggagttgatttttggtgttttgttttgtttttgaagtaataacgtgttcaatgaaatgatggctggaaggagttgggtggtggtggtcacatggtactagtaaggctatacaaggtttttttaagatgtcctctggttgtgttggtgtgtgtggttggtcagacccaggattctgcacaaactaagcaagcagcccccggctgtaggttttgaaatcaggtgttttgaaagctcagttttgagaactgctttaaatgtggccttaaatagatggtgtagttccctcatcataaacagaaaaaaagaccaggcaatttctattactatttatgtggtagtagagatgaagatttatgtgggaataagactacttcaccttcattaggtcctattcctgtactgtgtcaatagttgggattagtccatacctttaagcattttgcaaagacataaagtaaaagtatatgaatacaaaagacaagttttgtgttggaaatacaggtcatctagataatgtgcagtaagcagtgtgacttctattgtctcttgtaattatacgtattctgtaactagccagatagcttagtgagggatgctgggctgcgctgagctgacatgctacaatgctgatggtggctcaaaaggctgtctagtcaacatagtcaacatcatcagacagttactcttgcttttaactaaatggatcagtcacagagttga

SEQ ID NO: 2312 - DNA, 881 bp, Mus musculus
ccgcggtggcggcgcggctcgagaaatcattcaagaaaatgttttccactccgttcctgacttcatggcagcctgtgttagtttccccctttgtcaatactgttagatgtatgcccgctcagacgattagtccctcttcagctattaatcttgtgtatttgtgtcacatattacagtagaatcaatacggaaaaatcgtgccacgagggcgttagtggtggcttttctattgttttatgaacattccgtcacgccaaaatccactttggtggccatctgaatctgattaatcccagtagctcagcttgcttctgatgtatacggtacgaatggtagagcacgccagtgctcgaagaatcggtctcttgtagtaatcactgagcactattatattcatccagagtttggtaatatctgatcatttgaacagtttttgtgtaatatcatcaccaagtatattcggtgccttcaaaagcacatgatatgggccaggtgtgctggtacatgcctgtgatcctagcacatgggacggtggaggtaccaggattacggaattcaaggtgcagtctcgatgacataatgcctccacgacatgagcccctctaacaaagatatgtaatgtttaggtcaataaatcatattgtaagcataatatctagtaattcatgtctatagttgactggtttgaaacttaacatttttcagaatcccgttagatattattttgaaccagcatattctcatgtgatgtactagtagaagaattaaatgatgaagcttactggatgtcatctagacagtttctgatggcaacagattcagaagagtcatcgaaacaatagagtgttacctgaagaaagttgtgttcttcagaaactcaa

SEQ ID NO: 2313 - DNA, 796 bp, Mus musculus
cagcatgcatgagcgagcttagctgatcactagaagaactcattgtcttggtaagatataccaaggcatttccttgaattgatttgatactttcttgtgaaaaaaagtttcatgctgtcatacctgtcttacctcagtgtccaggacaaaaaaatttacagagggggtgggggtggggccaagcaaaaactgttaatcttttagacataaccctagaatatccttcaaagtgatttcgcttgaatcgtggattctgcccagtgctattcaccctgtttaaacctcttagtttactagggttgttggatttttgctccctttatcttaataattacatgaccatattcatgctgattataatacagaggacttatttctaaatggaggcataaatgattgtgagcaacatttagctgagcactaccaagttttgtttgttttgttttgtttttcctcttgttagagtttctggggttgtcctctggcctagaatagccacatgcttctaattatgatacgagattgtgactggatcaggctgtccttaaccagagtagtacttcttctcctgtattatgaatggcagtttttgtccaaggtgtaaatagaatttgcttaagttaaattctaactgtggcatacttttattataaataacacatatccgattgcacattaaacaagtgtgcaatttttgggttgctggaaccgaatactttaaaaatgaaaaaaacatgtgaggatcaaagacaggaacattaatgttagatgattcatatggggcttcaagatcgct

SEQ ID NO: 2314 - DNA, 715 bp, Mus musculus
cctcttctagctgctgctccagctgcttcctggatcccgccctttccctgtgacttacatgcctgttcccctcaggtagcatgacgagccgttaaacagttctcccaagaacacatgtcctgtccctagagtccctcccagtgatgagtctgaggtttctttggccttcctttctgtccctttgtgggtatgggctttcctgcctcctctagttatgctctcccctgacagggccccagcccactatgaaattgaaaccagcattatgaagcaatttgctgggagccattcactgctgctgccttcagagatgttccttattgagtagtgggtgcttctgttccccaaaaggtcactcagctaccctctatgctataccagaatgtgagctttgctcttctgaatagaaactgggtagagagggaggagtcttgccccactcctttgtgttagccctgccaggtccctcaacaggcaggcaggcaggcaagcaggcagacaggcaggcagagttgggttcctgaactctctgcagacagtggccaggctgccagacgttgggaggagggctggcatggatttgctgactaaatggaagcctgaacacatagcgatgactcttggcacccacatgaacatcttcctggttcactcatgagtgggtattttacttcatgaatcttatttttattaaatatgtttttaaacagaaaaa

SEQ ID NO: 2315 - DNA, 854 bp, Mus musculus
cgcggggcggcgcggtcgaggcactcagtcctctctgcagtctcatttcccatctggctagcccagaccatcatcagagacccacaccttgtggcttcctttctgccttcagacccccagtgactgtgcattcaggttgtaagacgttagagctggttaccttcaatgtgcatgctgccatggtgccctcagatacttgggaggggagatgtgacagcaaagtcaccgtggccggaagtggggaatgggggtccattcagagaagcatggcaagcccttggtcacctgggctgattccaaggctatccttgggacaaagcctttcttggattgacacctgctcaggatgcaggaggacgcttatctcccactagacacaggagtgtaccttccgttggctgctgggcatgggatgtgcctagatgtcacagccaagggtgtccttgcaacatctaaggtgaggtccatgtttccagggacagcgatgagctagagcctgccttgtcccctgcaggattatcctgagccaacagactgcaagtgactcttgagtgctgagctgagcagaagcgctaacagtcatgcagggttgaactgggggaccccatgcaccatacagggtgattttgactctaaggaccctttgggtgccaggaagggccacagtcaaactatgggaggctgaagcagtgtgaactgttgttcccccagccctgcccttgctcctaaaggcaactgtggatgtgaccattgtgggctcagcttggagagtgtggtcccactgaagcctcatgccacctgtggaatggtacctgtttctaggtacagagctcctgcctttgatcatgttctct

SEQ ID NO: 2316 - DNA, 694 bp, Mus musculus
gggatagtcgacagcttagctctgccaagaaagggaagacgccgagtgaactgaagagggcgcaaaaccgcagaccttgacggtagcgggcgaggatcagggccggagctgtgagatgtcttcccacaccgattctcattgaccagtttaaaatggttgccagccatcgcctggcattgggagggagaactattccatttagaccaagggggtggcagggcgagccccacgggaacccaccttgctctcccgctgctcttcctaggtcacggaagctttgagaaactgtcatctgagcagaccctgcgggggaaggagggagcttcaagccctggtgctgctgctcctttaatattttagccttgctggggatagaatccgtgacaagctaggtaaacgctctcccactgaactgaaccctcggttccctttccactcagtgttctgataatccttacaactctgaattttaaaatcctataatccatccatccatccatccatccatccaattttttttttttttaaattattttcagggcacgggtgttttgcctgtatgtaggcaggtctatggagttcccctggagctggagttgacaattggtgagctgccatgtgggtgctgggaattaaagccagatcctctgggcagtgcccttcatctctaagtcatttctctagcccccaaaaa

SEQ ID NO: 2317 - DNA, 757 bp, Mus musculus
gctcgagggacagcctcatttaacaaataaattcaaaaagtaggagtagaagcggctaggcagcacagtctcctgcagctaacaccaccatggctttccccagccgtggaacaagagaaacactgcaggaagaagcatctctggctaaagctggtggcagcgctgatctatgggcagaagtgtgggtatttagaaggcagtttgactgatacattacgttccatttagcagaacagctttcccactagggcttatgacctcccaaaacatacatggccattcctttctgaggagtggacctcagatgcaatcagagagtggttggtgaggctgggaaaatggctcagtgagtaagaacacttgctacacaagcctaaggactggagctcaacaccccccagcacccacataaaaagccaagtgtggccatgcacatacctgtaacccaccaatgcggaggacagaaacaggatggttggggcttgctggctgctgttagcaagtctagttcagaaagctagtctggttcaaaaagagagcctgtgtcatgggaataaagtgggaaaggctagctcggcacactcgctgtcctcccctgaggtcttcacgcacacagacacacaaagaaacagggaggaaaggcttggtgacctccaaactggctgggtcactgcagcaccaatgaccacatcctacccaccaggttggtagcatagcaaaagtaaggtcttttggcgtcccaagaaggttgactaat

SEQ ID NO: 2318 - DNA, 851 bp, Mus musculus
agacaaattcatgacactttcagcagaatacatgaggtgacattgcagacccacaggagaggatggatcagaaggctccatttgaagttggttgaagtgggttggtgttaccttaggtatcttgatggaggtaggaagtcatggcatttgacagggagcacagctgttatctcagcattagtaacatgcgaatctatgactcccacaaggctctgatatgtagatgaaccacagcaaacatttgtgttatgatactgacttctgaatatttattgacagataggctataggtttcctttattgagaatgaagaaataaactgtctttatctttcctgtcagtaaggttgggggagggggcttttgctggtttgtattttcacatttcaataagcatattttgaaatcactatttcccatcatatacaatatcatataaaataggggacacatttctgtgtcccttagcaaaagaaaggtctcaacttgatagcttttatgcttagctcaactttgtaaatgttccacaaaagaagggggcagggaaggctgggcgctgcacccttctgcccagcacgttcattacgcttttcaataaaaatagaacttatttcccgcctgttaccatcatggtaaaaacttaacaatgtagttccttctctttcttatattgcaaaagatagttttaatttagtcttgccatatttatatagctaagaatttactacattttggtagtctgttttgaaactaaatacttgtatctgacagatgcagattaagtctgctatttcttacacagtgggctctgtttgtacagaaaagagtgaaacttttcccagcttagcacat

SEQ ID NO: 2319 - DNA, 813 bp, Mus musculus
  misc_feature (758)..(758): n is a, c, g, or t
ccgcggtggcggcgcggctcgaggttcgggcttcacaaacaccatcagcagggtaggtgctgagataaggaagcatcgccaaattgaagagggtggctcatttccaatctccccttcagtggctaccatgaaatgggctaaaacaagagtctcctgcacttcctgctgacacagccactttgcatttatatcccaggaatagtggcaaattgctgaggaacccgtatttcatggaaataatacaatcatgaacatttcatcaggagagggaaaggcaattaatatgtgtcatgtgtgttttaaaaactaagtattgctaagttttgagtgtcagcaggtttcttttatcttacaggctaacatagagaaaactaacgtcttggctatagggagtgtaagctcagggggccaggcatccctgccagctccttgaagcatttttactccagctcctaagaataccagtccatgctatttgagggcttttgttcctggagctctctctgtcagcgacaggaactctaggtatttttgaggaggcagcagcatagcctgggagggtgagtggttacccagcagtcgtgctcggaggtgagccaggtagatgtgctgaggtacatggagataccgtatgatcgtacaagggttgaacggaggacatgattccaaaaaagattgttctcaatgtgtcgtctgactcaaccagctggcagattacactttgccaagtcgcttcctttccttctaagtcatttggntccatattcccttgaatatgcctgtgaggaaagtaagatgtgtcgcccatccact

SEQ ID NO: 2320 - DNA, 785 bp, Mus musculus
gaaatctctagtttcaggctgatgagatgtctcagcaggtaaaggtgtgtgtgtataactctgacaacctgacctcaatccccagaacccatggtggagggaagagccagctcctgaaagttcccctctaatctccatgtgagcccacctgagtgctcctgtacatacacaggccacacagtccttatttagtgtgtatgcgtcttttgcctacatatatgtctgcaccatgtgcatggagtacccaaggaggtagagtaaaataggccattaagtggatttcctgtgattgaaattgagagacttttatgagctattatgtaggtgcatcaaacctgggtcctctggaataacaatcagtgctcttaacctctgattcagttctccactttctgccccaccccctgcaagttaaataaaaataaaaataaaaatttctagcttcatacctaaggaaaaaaatctatctgaaaggatttttgtgccccaccccttgtttcaatggctttcttcccttgacctttcctatccagcggtgtgttgggtgcgttgatttagatacgtttatgttctctgtttaggcccaagaaggaagcttcggtggtggtgtcttgacacttgggtcatgttcagttccttacagtctggtgcaaagatctagaatccatggccctagcagaagtctccctcaaaagacctgttagcagctgactggccctggtgaagggtgatgcgattaccacgtccaggtcatccctcatctcggatgctcttactgactttct

SEQ ID NO: 2321 - DNA, 784 bp, Mus musculus
gggtggcggcgcggtcgagcctgttccagagacggcgcagccttgtgagactagttgaggttcactgtaccacagcacacggtgaggcgtaattctttctataatcaggcaccttccgctgcttccgagtaaggtcgttttcctgtgtagagcgtaacactgcagcagaggccccaccctgccataggcagcccggcccgacagctgtccacacagcattctgtggttgaaaaatggatgtctaccaggaaatccaggacaggccatgttttctcagaccccaactttgtgggcactctgttgcttgtgtgagaaactttctggcatgtggataattatttcaaactacagttcaggcaccgatgcaactgtttcatagcgtgtgcagaacactcttagttccaacacgacactttgcttctgcactctgaaaacctgctatcagaaaccatttctatccttggagtgtgagctctcagtaggaggcttcatcactgtgtttgcatatcagtcttctcccctccactctgttgccatgttattctgagcaagtcatatgccaaatgccatgtacaatgtctgtatggaagattaaactgctctcctgtgtggtaaggctgtttagttgccgacttcatagttgggatctgatattcccacaccgagtccgcgatgtatccggaaatccaggttggcgtcgtacatttcattctgatgtgaacttttctctgctttcctttgttctaagactccattttgcaataaaccgttttgaccagaaaaa

SEQ ID NO: 2322 - DNA, 870 bp, Mus musculus
  misc_feature (152)..(152): n is a, c, g, or t
  misc_feature (715)..(715): n is a, c, g, or t
cggcgcggctcgagttagcaaggtgacatcttagctttagtcagctacttccccagagacacctgggatggccacccatgcagcaaagccatgccaggacccagagtattcttagtgactggaagatttcctgtcccagttggctccctgtnggtcttccaactagaagaacagataagttgtgacaatacctcttgcttctaaagaatgtattcctgtacaatgccacagattttcttttcttaagaacactacctgattctttccttgtgctagggatgtagggcatgctggggtctcctgtcagtattcaggtgtgctcaactgaccgagtattaggttgtcctccacctccaggctgcatcacttggaggagctagctagtggccggggtttttgcaatcttggttcaagatgtgctctgtcaagttcatctcttctcacaccttccctctcaaactctttctttctctgttacaaaggtatctgtgagtctttcccagcccactccccaactctagacctccaaaccaactggagagaatcactaaccttgagcggatgacccagttctgcatcgtgcaaatggagccctagctgaagggcagttcatacaaagtgcagtggtcttcaacaccctgagccttcctgaagaaccagtgcagacattcttctttcagggtgcaagggcccttggggcctttccagctccctngccctaagcatacctcaacacagaaccacaggatctctgcagcacacctgccgtgcagcttggtctgttggcattgaacaaacagctgttgctagagacacgtgggcttccaggcagtggactggagtgtccatcaggtggcagtacttcttagg

SEQ ID NO: 2323 - DNA, 897 bp, Mus musculus
accgcggtggcggcgcggtcgaggttccagactgggccagatgaggaaggaagtgatgacaaagcagttactgctatgggaattctgaacacaatgatacacttctgagtgtggttgaagatcacaaagagataacccagcagcttgagggaatctgcttacaagtcattgggaccgttctacaacagcatgtcttagaattctatgaggagatcttttcttggcacatagtctgacatgtcaacaagtgtctcctcagatgtggcagttacttccccttgtgtttgaggtatttcagcaagatggctttgattactttacagacatgatgcctcttctacataactatgtaacagttgatacagacactcttctctctgataccaagtatctggagatgatatacagtatgtgtaaaaaggttcttactggagtcgcaggagaagatgcggaatgccatgcggcaaaattgttagaggtcattattctgcagtgcaaaggccggggcattgatcagtgtataccattattcgtggaagcagctttagaaagactgaccagagaggttaaaacaagtgaactcagaacaatgtgcctgcaggttgcaattgcagcattgtattataatccacacctactgcttaatactttagaaaatcttcgcttcccaaataatggttgaacctgttacaaatcattttatcacacaatggcttaatgacgttgactgttttctggggcttcatgacaggaagatgtgtgtcttggctatgcgccttattgatatggaacaaataccaccaggttttaaatcaggttcaggacagattttgcagttttatccttttatttaatggatcgaaagagcatatgcctgcatgcagaacacgagaatga

SEQ ID NO: 2324 - DNA, 859 bp, Mus musculus
tcgcgactggagtttttttttgaaagaactctgagttgcacatactggcacagatttctttcccactgcccttccccacaagatatcttttcattggtccatcagttttccataccaaacgcaagaacatcaagacgaaactgttaactcctgttactgtctgtgaggagctggcggcaggttctacctggagaatttagagggagagaaaggtagccggataatcctgaaccctcctgaggaaacagttcacagagtagctccctggaaactgatgtcaggatcagcctttaacagcaagcctcttggcagagggcactaactaacctgctgccccagtgtaaactgaaaccaagttccagtgggaaatcaagggtgggaggtagccattggaaaccaggaaagggcaggcaggctggacagtctaaaacatcttttaacaaactaactgcacggtagcaaggactagcgggtcgcgttctcatccaccttggcacactgtatgctccatatgccatacattcaggacataggcaggaggacagctgcttggaggggacttacaaaccaagcaccttctctcgtgtctgtgtcacagctgccactcagttccaggcatgtacaccgggggcaacttgtttctgcagagtacaagggggccggcaggctttggagcggcctacccttggccttgcctgtggtttcggtggggaggacacatctggggacatgatggggctttggttgtgatttccctttaaacaggaagagatggttcacattttccatatatatatctcaatgaatgtactgtattactgtgttaaaattgactgaaactatactggatgggtctcct

SEQ ID NO: 2325 - DNA, 691 bp, Mus musculus
aacagttctatgtagattgatcttttagtaaatttatttttaatgcatgaatatttatagaacacgtgttactacttctgtatatttaagaacattttaaagctcataactactttctaatttatattttagtgtattctttcttttaaaatatctagttttgctgtgtgtggtgatgcacatctctgatcctagcccgtgagaggtagagacgggaggatcaagtgttcagagtcatccacagctacagaaatgagtttgaggccagcctgggcttcatccacagctacagaaatgagtttaggccagcctgggcttcatgagtccctatctcaaaaaaagatccaaaaattaaatacacagtctctattgttactgttagctgtagctttagactcaatatgtattagaaatctggcaaattacagggaaaatcaaacaagttcttacctgaattactgaagttttttcttaatgtatagagttaatgctttaaatcaaattagattcagtgttgcaaagaaatatatatgacagcttattttctgtctagtgaaatttctaaataatatatgtgtttctgtaatgaaaattacattttggaatcaaatgtgctgaatttagtataaaggattctttgtattgttctgtaatcttgacaattcttgtgtaattctatgacctttactta

SEQ ID NO: 2326 - DNA, 834 bp, Mus musculus
gcggctcgagaggacacctctgtataacctcctctttgacaaactccttggtcttgcatcataaaagccgaaccatagggcagaggaactgcgtagtgtagaagtggccagagccactggctgagctactcagctgatcatatctttcttcctttatggtgacccatttcctggttgctgagatggctgcttagctggcttggtgcccagaggcctgaaacaagggacaggtgacactgtttcctaagagttccctttctgtcattcttttacttgtaccctaacctttgtatccctaaagctagaaccagagacttatcgttaccaggttctgatctgtggttctatttaactcttccagctgtgtactcagccctgcacgcacagaatttagtgactttggtattgagtgcaaagttgggccatgggacactgtgatgaagttgacatctttagtcctcaaagaacatgcacaattgaaagaggtctcacccctgtgatgtatctgctaagggtcccatagtggcagttaagaaggggaaccaagaaggaacagactttggcagggagtgcttaatgtgtaaattccatcctgagacagagggcaatggagagagtttctggtccctggcagtcatgatgagccccagggacttggacaatggtctctgtcttcttattgtacttgacttcacagtccctgtctgaatttgcagtatgtctgtcaagggacccagggttatcatttacccttcatgccaagggtcaaagatcttgggaactcctggagagccattttgttcttacaaattgatcagatacggaagccccaag

SEQ ID NO: 2327 - DNA, 805 bp, Mus musculus
aatcactataggcgaattggtttctaccgcggtggcggcgtggctcgagtgagagaagaggagaggagaagagagaagaggagaggagaagagagaagaggagaggagaagagaagaagagaaaagagaagagaagagaagagaagaggaggagaagaagagaagagaagagaagagaagagaagagaagagaagagaagagaagagaagagagaagagaagagaagagaagagagcaagagagagaggaggggacaagcagccccttttacagtgagtcaggcatgcctggctgttgctaggtaactgtggggctggagcctagacgaaatgccaacagttatgatgcattatgggattatagctcaactgatggcgcacatgcctcatgtccacaaagccctgggttgcattcccagtgtctcataaacagggaacggtggcacacacccgtcattgcagcacgtgggagttcaaggtcttcagctaatatcaagccaacctaaggtagatgagaccccctggggtttttttttggtggtctggttggtggtttttggttttttttaaaaaccaaccactgtgagtacagaaggtaaggaccaggctagctgggcatgaggaaacccaccctgtttctctcttatctctgggtctggcactgttagctcttccttgatctgtccacttgggagagcgaggctaagtgaacttcagtagccagcagggctacttctgcctgcccatgcctgagtgagggtggctgagtcgccatcaactcctcagtctctgtgacacactagag

SEQ ID NO: 2328 - DNA, 837 bp, Mus musculus
gtggcggcgcggctcgaggttccaccacgcccggcgaggggcttctcttatcttcaagaatttcactgcaaagacctcttcctcagtgtatgtaatcaagagtgtaaaaatctgagaagaaaaaagccattgacattttatttgcacattggagtgaactggaatggagtctagcaaagtcgtgactgctgtctgtttttgcaaatacagttttgttggaacacaaccccactggctcacttatgtttttgtgtctggctactttcatgtttcatcagaagcattgagtggttgtagcgataaccctgactctcaaagcctaaactgtttactaactggctcttgacaaaaggtgttttctaacgccaaattagactagaaaggagatggtgaattatacttactgcttcaaacaccaggaagagaattagaatggaaatcggcagaactgtgtatagtcttttcactgcaaattgtacaggccttgattgatgtgaaaggaagctatcatttctgggaacaccagtcagtcagtcatcttcgtggcacttgtcatctcacctggcacaaaacaaatggccacaattatgacatatgcatttgtcatagaacctgaaaataattacaaatcaagtaaaaaatgataatgtggtagtataactatcataggtgtgtagttagtgggatcagaagaaagtaggcttgagatggcaaggttggggttatcagtttttaatctggtaagtgaacccttccatgatcattgggatgttaatcttctatgttcatatgtcaaacttgagaattttaccagcacaaagttgactaaaaatctgt

SEQ ID NO: 2329 - DNA, 759 bp, Mus musculus
ggtggcggcgcggctcgagtattgatacagctggccgatggctttgtgaaaaagggcatgcccatgcagcagaaattaaaaaatgtgtgaccgcagtggataagaggtacagagatttctctctgcgcatggagaagtaccggacctctttggagaaagccctggggatttcttcagattccaacaaatcgagtaaaagcctgcagttggacatcatccctgccagtatccccgggtcagaggtgaagcttcgggatgctgcccacgagcttaatgaagagaagcggaagtctgcccgcaggaaagagttcatcatggctgaactaattcaaacggaaaaggcttatgtcagagacctccgagagtgtatggatacctacctgtgggaaatgaccagcggcgtggaggagatcccgccaggcattgtcaacaaggagctcatcatcttcgggaacatgcaggagatctacgagttccacaacaacatcttcctgaaggagctggagaagtacgagcagctcccagaggacgtgggacactgcttcgtcacctgggcagacaagtttcagatgtatgtcacatactgcaaaaataaacctgattctacacagctgatactagagcacgcagggtcctactttgatgagatccagcagcggcatggcttagccaattccatctcttcctacctgatcaaaccagttcagcggataacaaagtatcagctccttttaaaggagctgtcacatgctgtgagga

SEQ ID NO: 2330 - DNA, 700 bp, Mus musculus
cggcgggctcgaggcatgtgtgaggagccatgcaggaaagggaaagccctggatctgttgcatacacttgaagggaaaagccaagtggctaggaaactctggacctatttcccatgcgattcttttcttttcttttcttttctttttattttagatttaatatactatacaagatggtagacttgtgcagaccagtttcttacataaaccattgttgcccacagtggttgttcattcatcatcattggcctggtccctactccacttttttcctctctgggcatgacccacctttctttctatttgctgtaggctgttaaatacgatcctgacctgccttgtattttcattcaactgtttgctcccacatttaagggagggttgtctcttgttttgccagaaaaataaataaagtgtcatagtctgtacgctggatttgtagggccagcagaactgctggagtgaaactggtttcacttctaaggcccttccttgctttctcacaagggtaagctctctacaccccctttgatcctcggtccaattggtcctccttgggaatctgaaatcagtttccgtgttgtatgcagattagaagttgccttgtttgctgctcttcccaggcagagtatcagggagaaagaggcttatctgtccctccatgtcccctcctgtttggcacacctgctgagaatccctc

SEQ ID NO: 2331 - DNA, 786 bp, Mus musculus
cggggcggcgcggctcgagcattaatcacaactttatttttcagatagcagtgccctctctggacttgcctaggttccgtgcttcctcttctgtggtctcactcttccctactcttgcccctcactctgaggttaaggggtcacttaaaaccttgcccctgggtcgtccggtaagcctgtggaggatgtagagtcggtgctggagtcttgggcacggcatttggtaaaggtggaggacaccctgactgggcggggagggatggtgttgattcacagagggcgggacgtgagtgtggaccctggggtgggctcacagccatgtttccggtcacccaaatgcttcatggacgtggtttatcactatagtgttcaccatggcaagcagatggcaccaggagatatggagcccctgccagtgtgagtcgtagcagtgcaggagggctcaccctggaggagacagcggcctcggttgacgcctacacagtgaattccagaggcttaggaagcgcgtccctgccctgggtccaggcctttctcaggaagccctgtgctcaggaggccatcgttgaagtcagcttgtagggggtgggcaggtgcttccagccggaggggccgtcggtgtgaatgttccagatgaatgtcttgttctgggagcatcattctttggcggatgcatgaatggcagcaggcaccctttttcatgggggtagaggcgttcgactgtgcatcttctaaacaagcctccatccagccttgtagttctgtgctgcgaaattggctcaaaaa

SEQ ID NO: 2332 - DNA, 776 bp, Mus musculus
tgttctcttccatgtttaacctacagtctccttaatgcttccagtatatacatgggtgcagtgccatcttctttggcatgactagcctctcccttacccagcaggcatcagttgccaatagctactcaggagtgggcctttctgcacacctcccacctccatgctgtcattttgtctcgcttgtatttccagtcacagctgttgtcagttagtaggtgcaactgtcctgttgtatctagcacacactgtttggctgtaataattcactctggctctcacattctttcggctccctcatctgtaatgatccctggtcctctgagagaagaaatgtgatgtgtgtagatgctccatttagaactgagccctccagaatcacttattttctacatgttgaccagttgtgaatctattcattataatctactgcaaaaacagtaataaaacccatcttctgtgatgaagatacatttttctatgggtataaagataccctttaacagaataatagtaggttagtagaaagttctccacattaatgctgcagacttgggttttatcttgtgggttgtgtgaaataggcctgaaatccagtcacagtggttggttattcttgccgtactcatggctgtgtcttgtcagactgatctgtaattgtagctcagaggttctcagtgggtaaacacagcatcatctagcactatgaaagctagccagtagtgaactctctagtcagtataagctatgatttcttaatactctgtgactcaatgtgt

SEQ ID NO: 2333 - DNA, 788 bp, Mus musculus
tatcttacttactggctcactgggtcacacacagacagtgacaacccaaaacgtagttgcacaaacaatattcaaacagtctccgacgcacaaacccgtgtccccagatgcctagggcattcacactacactaaaggctgaccccttctcagaacaacttcctggcaggttcagagggacacacactccaatccaaatagcactctcaggctgacacccgcaatagctgaagcacagccactagactgcactggctgaccctacaaaacatgccagtcacatacagaagaaactgagcccagacctgtgctcacaaagtcactcctgagacaggttcctgctaaatggcttgatggcgggttacactcgtgaacttaaacacctggcccgcctggcgtaatacccatctggcactggacaaatggggaagaggcagccctgtgctcctggcacagacatgcccgggcagccccctgcaccctatttcatcctgtctgttgtttctgtttcctttcccttttctaaaagtcatttatttcccttcccttttgaaacagtgacccttcctcctcccaagccgtagacatctctcacggcacttgacagactctctgtctcacccaaactgtcaccaaacttactgagtatattacttacctatgggtgcccagcactgggcccgctgtgaacagggtgtcacacagccatgtgagataagacacttgttaaagaaataaacatagtcacttacacctgtcttcccagcacttccagaggataaagcagga

SEQ ID NO: 2334 - DNA, 652 bp, Mus musculus
gctcgaggtacagcaattacctgcccattccaacccctgacgggagcagacctctgctgtcctctgtgacttgctgctattgaggacaagggagtttttctttctttagcatcttcagtgaaggatacaacaatgcctaatgtatttaactttcagcttgtgtctttggtgtaggtgggtagaggggtatggataggaaaaagcaaacagacaaacaaaaaacccaaaattgcatgtaagtggctttgtaagacagtgagtgggaaattctgtagtcgtcttggcttaccttgttgggtataaacctagcttcagaggaggctgacggggcaccattcccatgagcacctgtgcttaacaatctgggcgcccttggcaggtgggtaggcaaatgagcgtgcagttctggtttgttcctgcaacaccttgttctcatggactctgccttcctcctgctctctggtttccatcaccaccaccccctctcacctctgccctgcaaaatgtctccttccagccccactgactctcagtgttggagcagagctctgtcgcaggtgatgacgtccaggtgaagcgccgcttatattcagacatctgcagactgaaggctgaactttagtgtccccagactcctgggagcctgtgggga

SEQ ID NO: 2335 - DNA, 861 bp, Mus musculus
ggaagagatggactaccgggactccacagagggcagcctgggatagatgggcctcctgggcctcctgggccccctggccctccaggatcacctggactgagaggagtcattggtttcccaggatttccaggtgaccaggtgatccaggttctccaggaccccctggattcccaggagatgatggagcaagaggacctaaaggatacaaaggtgaccctgccagtcagtgtggtccacctggtccaaagggtgagccaggtagtcctggataccaaggacgtactggagtccccggagagaaaggctttcctggagatgaaggaccccgaggaccaccaggcagacctggacagcctggatcttttggaccaccagggtgtccaggtgacccaggatgcccggactcaagggacatccaggagaagtgggagaccctgggccaagaggtgatgcgggagatttcgggaggccaggtcctgctggagtgaaagcccttctgcttttcccatctcagcttttcaagactcctagcctttcaacaggccgtgggtccgtgtgcatccctccgagagcaatgctgaaggaaggagcactcttcctttggaagtttccagcaccctggagcacttactggcaaggaagtaacctgacgggagtgatcgttagaacaaatggtctcttgatactttctccatagcaatgtgaaaaccagggcgacccatgacggagttaaggtttcacacagcacaatgatactgttgtgctgagattttcctctgggcggcttgtggacattttcctgcctctgggcaacccctcagccctccggcttctctttgacttcaacattcttccagtctg

SEQ ID NO: 2336 - DNA, 881 bp, Mus musculus
gcggcgcggctcgagcttatttcctttccctgggctgtctgagtttctattatgccatgacacatttgatcttaggatgggacagactgttgcacttgatattgttctactgtcctcgcccccatttctctgagcatctcaaccagtttttggtcaagtttacaggtcttctagaagacgatttccagtgaaaatactggcagtgagtttgttatggtgctgcgatggcattggtaacaagccccagcggtgcaatgagctaccagaaagacttagctgcccagagctgtccttgcaaggagtttctttcccacctggggcacacaaagtcagtatttgtgtttgattttgcaagttacccaagaattaattaactaatggaaatgtattggtgatgttgatactgcagcttagcaatgcttctgtgtggcactttataatcttcaggcgcctttgaggactccctgtgagccaggcagtatcgcagtgactgtatggtcagagtcctaggagccctgaaaaactggttgctgattctgtctcttccccctcctgccctcctctctccgaagtttacatcctaaaaggatagagccagaacttggttacagagtctctgactccaagtccaaagttctttatactggtctttccttctagctttatgtatacaacaaaaggtatggaaacagatcttcacactgttttgcttattgtgaaaaccaattcttttgtattggagtgacccagaaagtgtaactcttactacatttttgtccctgtagtgccacttgttcagggactggattgtactccagatactgtttgattgtgaaactaagattgaacataccgctgtaattatttaactctgaaatata

SEQ ID NO: 2337 - DNA, 690 bp, Mus musculus
gcggggcggcgcggctcgaggcatttctcggcacagccatcagggccaggcctcatttccctgctacttctggactgggctctgacatctgcttgtccttggtcttctagagccatccatctctgtggtatcctgcaaagggttccgtttcagcctcaatatggcttggggttggagccaactgtacactgggtggtggatgctcagagccaccctctacaggcctagggcccaggaggtgggcaagcactactccagccagcctggcctaacactcttggtactgccgtcctgccatgggccccatcccccttcctgcctggtctttccctttgcacctggactcaggagtgcctgagccattccaagctgggcctgggtgcctggcctccacatgccttgggctggctctgctctccagctgccccactctcttatggttggacagctagacagagcagcaggggtgagggccttgatgtgtccccaagagacactgcattgagtccaggcacaggccagcaacctctgttggttcagaggggtccgactgccaccctctactccagtttccccagttggatctggtggctcacatcggtgctacacaagctagagtagatatatttagagagagaaagatatttttaaggtgaagcccatgattagctgtcctttaatgccgcagaa

SEQ ID NO: 2338 - DNA, 764 bp, Mus musculus
gcggccgcggctcgagcatttgttaggctgttgtagacagagctttatgccctgggaaggatttttttttttaaactcgccccactcagtctttccatcattttacatcgtgagtcactcacacggtcatcagtcaccaccctgacgttcagaaattacaacctgccttccacaaggattggcgcagaattctccctcaggctccctgcgtgcgagatgtactcttctctgtagggggaaagaaccccccaggccttgtaggagggcagtgggcagcatgagcctaagaggcaaacacagctacagtgacagaatgcgatctgtcactggtgataagacgatgggctgaaggatcagaactccacggagtttatgagagagcacttgtccaggagttggaaagtccaaatcagacatctagagagaaaagacaatctaagcccttataccagcaatccttttggtctcctaagagtgccatcccttgtcaagatccagtaccaggagtaagcgacctgtgccttttacaatagcatctatttgaaaatgcagttgcccctggtttcccaagcctggtagcactctgaatagctggaacttcaagccgaggtggcttcacaccaaatgacatactggctgcttacctgtgacataatactaggatgaggatttgccgacgactattttggcagtctaaccttgggctggacctaagtctataaactgtatgatgtctgttggtttgtaaatgccaattaaagaaa

SEQ ID NO: 2339 - DNA, 151 bp, Mus musculus
  misc_feature (74)..(74): n is a, c, g, or t
gaggaggattgcacctctccctctcctctcacggtgtacaggcagagctgcatctggttatgaaagcctaagtngacgaacctaaggcttctctttcctcatgtctcctgtgctaacagagcatcacctgataacgaactggacacacggt

SEQ ID NO: 2340 - DNA, 759 bp, Mus musculus
tgtttctttaattagtaatgggggacagaccagaagggggttgcaagagacagtgtgcagggttcagcctgcagctgaggcaagtgttacttagagaaaagtatacatatatgaagccaaaaatcaaccagcaaggaaggtcaagtgctccctacacaacaaacaaatgttagcaccaaaacatgtattggcctcctctttgacatgtaaattatgtgagccctcaaaatctaagtgttgtggtattgagttgagtggtgagtttggattctgtcacctaaacgcttaacaaagaaagcccaagttctgtggaaattttaatcatagcagatgtctctgtgtcaaaggatatgaagtttcctgcccagagactgctttagttttaggatataattgtggaagtcctatcattgttccccaaatacatttctgttcatctctacagacgatcagctgttagatgccagcctattgtaaagttatgactttcatttgacaagttccacattgctatatggtggtaatgggtagatgacacataaggagttcatcagacaatctctgggtgtccaggctacaccccctagatgaatctaagccacataagaattattatttcggagtcaatggctgtgagactaggacaaaccaggttcaatctacacaagaagaaacctaaagaccattcacttccctggccttacagctaaacatggacaggaagttagtgctggcacacgaggaccaagcagaagaatg

SEQ ID NO: 2341 - DNA, 730 bp, Mus musculus
gcgatggaggcggcggcgaccgtggttttggccctggcgctgctcggggccgcggcgcggggcgcggcgagtgacgacttcaacctgggcgacgccctggaggaccccaacatgaagccaacccccaaggccccaacgcccaagaagccgtcaggaggcttcgacctggaggacgccctgcccggcggcggcggaggaggcgcaggagagaagccgggaaaccggccccagccggacccgaagccgccaaggccacacggagactcaggcggcatctcggacagcgacctggcagacgccgcgggccagggaggaggcggagccgggcgacgcgggagcggagacgaaggcggccatggcggcgctggcggggcggagccggaagggacgccccagggcttggtgccgggcgtggtggcggccgtggtggccgccgtggcgggcgcggtgtcgagcttcgtggcctatcagcggcggcgcctgtgcttccgcgagggcggctccgcccccgtgtagatgacgccatggccccgcccctccgggcatcatcgccccctccagggccccgatgacatcactgacgctgctcatttgcatacgcgctccgccccgctgtgacgtcactgaccccgcccccggactcgcctgaatatgcaaatagtcggacccgactcccgacgtgaaatcaccggctgcaccgaccctcgccgctgcatcagtgatgtcacta

SEQ ID NO: 2342 - DNA, 785 bp, Mus musculus
gcggcgcggctcgaggttctagatcgcgactggacttttttttttttttttttggagacttcatactattttatgggagtcaaaggcacttaacacaaatgtcactattttatctgtattagctcataccccaccgacctatctctagaaaagcattcatttccaggatagatgctctagcagttaaacactctggccaggctccccatccagacccaggtagctaagattctattttatggttcacagatttggactaactctgaggcacctcatggtaatatagaaccatgcaacctgggtggtctggtgactgggttcatccgggtggcttccctttcaagcctctgtaatatggccactggctttattatgggtaagactattatgggttatccattcatctggtgggtaggtgggactattcaggttggctccccatttgggggctactggcaaataagttaagaagtggttggttggcacaaacttctacaagcctccctcttttatacccgggttgggtgtgagacagagtcgtgcattattgtagcctcaagcttaccccaaaccttcaccatggttagaccgggccattcctccgtggcctcgtgcctcccgagaaacggggattcacagacgttatgcctccaaacccagtctggctttctggtcctttcagattattatacctaaggcggggattctcagagatcacctgggggatacggcattgggctttggggagagtcaccaaaccaccctagaactgggggtttttaagc

SEQ ID NO: 2343 - DNA, 770 bp, Mus musculus
attttaaatatatgtattcctgatgcttctgcaaaagaaaattacagttatagagactcaattattactcgatcacactagctgatgtgcccaacattccagacatggcaggtcttttccctttcatggctttcggtgtcactgtgaaagcctggttgggaaagtcatttcctttcatccaagtctggaatgaagagtacaggctcagactggcacctgattctgaatgtaatactgcagagagacagcaaatttagttgcttttgctggaagagacaatgcatgatttagtattttcacacgttaggtacataatccaccactgtcatgaccaccacctggagggaagaaattgttgccgcatcagagaatacataaacatatttaacagagacatccttgtattaaataatttggtaattgccagagatgaataaatgtataaaatgaggttgggtcatgaagcacttttatgttgaaatctaaattcttattcctaaatacctctgttagcatggcaggtttgagttgcaactatcctcctagtaaaaatgaatctttaagactgggacgtatttgtaaataatagatccttaaaatataccaggactttatctaaaactcataaggagaaataatacttgctttatataaccagtgataccactttacccttgatgaagatgttaatttatggttggttagcagtttatggctgtcattagtttttcagtttggccacattagaaatctatttttcttttttattt

SEQ ID NO: 2344 - DNA, 637 bp, Mus musculus
agtaatgtttgtttccagcaagtctcttccactccctatagcaggagctgcatggtcaaatctctcatgggttaaagagtgcttgctgtttattgttattgtgttttgaggtcaactaaatgattgtctttggaatcgttctgtggctcagttatatcagaacatgattcatctagcgattctgttccctgggcttgccggagaagagctttctttctgcaacaccttccccccaaccccaccccgaaaggctgcttgggagccattttgcttcttgccctggtcttaaaatgactaagtgccttttgaatatagtatttatcagactgcagaccacagggaaatgtcagaaacctgatttagggtggacatttattttaagaccagcgtcattaacaatttcagaaggatgggaccgattgtcacttgctgctggacaaagagtgaactcggcatttgtagttaaaacacttgctgtgcagaaaggctctaacagaatgtcctccatcttgataggccagcacaaatgaaccattttaaatgaatctgaatcttagctgcaagattcggtggatgacctgcaggtgacgttctagcgtgaatggatgcctgatagagcccacactctatgctctct

SEQ ID NO: 2345 - DNA, 764 bp, Mus musculus
  misc_feature (603)..(603): n is a, c, g, or t
cgcggtggcggcgcggctcgagccgccggggcttccgggaggcggatcgcggggaggctctggcgatttcatccaagaccgggcttccaagaactcggcggttcttggaggagaggcagcagcatctacggcaagactactaaacggagatcccccgggaagggtggcccggaagagaaatcagtgcctacggggcgccgcgagggccacgccgcgttgccgttcgagagcactcgataaggcttcccgccgcaccatacatagatgaagttgtggcgactccgattctctttttaaggatgtcggtgccaggtggaggagggagaactacggagatgaaggatagaggcgcgggggtggaagcaactgagccagagggcgtttgggagcccgaggcagcgccctggaccggagatgggactcctgggtccaggcttgcacacctccatgcccaggtcgctggagcgtcgctgcgaccccttcctgatgaccggccagagttttgcggaggtagaaacgagtgtttttataaccttcacccgtcccctgcctcttgagtcccctgacagacttagcacaatttgtccagggcagagaagtgtntggtagttaaactggcaaacgcaaggtgtgctgtgatactaaaaagggctataatgacagctccgggatctagcccattggggtacgcacgccatcttcgctgggtttcctgtccccgcgcccagaaactgtattcgagccagattttggaaataagggtg

SEQ ID NO: 2346 - DNA, 689 bp, Mus musculus
taaatgcatacttcaaaatgccattgtgggaatgaaggttgtccattaaggaaagggtgaatgtgtcactcttatgatgtctctacgggtgttggtgggggggcgctttctttagggagtactggttctttttggctagacccaccatggcttgtgacctagagcacccaagatcaacagaggcctcatatttaccctgaaagctgattccaagggatttatattgctcacttgcatatcacacacacacatccaatgttggtttctatcttcccgaattcttagctagctggcactggcctaaactccaaagactgcctttaggaccattaactggcctatgcaagcaagcggggtgggtattaaggcagattgtatattttgtatattctgggaccatcccttcaagacgcgtctaacaaacaaaagtggcgtttggtccgtacaaggttgctgcaccctcataccagctggctccctcctgccctcctctgactgttttatccactgactgttaaaatgccgccatacatatttgggatgcaaaactgaagtcttttaaaagaaataataataataatataagcaaacaaacacatatgacagcaacttcaagatccttggcacttgggttctcagtttctacggctttggttttactgaaatgttgaatctacttgtctgagggt

SEQ ID NO: 2347 - DNA, 761 bp, Mus musculus
gagcaccggatggtacagtgctctgaaggaccggtagagtctcgtcttcgctcatgcctgagctgactgagtttcaacccttcaaggcaaagagcactatgcgtgcctgtgtttgtcctgtgcattccagcccaaggtgaggagatgctggagttaggttcagccctcctccaccatgaaggtcaccaggcctgcacaagccaggtggggctggctgggagtctggcagatgtatccccgccatgcacggacagggctcccattatcgctaatggctgcgacgtgctcaggggaggcagaacatgtttcaaaggtttatattccatctgctgaattgattctaatctacagggctgactctactttgggctcctaggaagcaaacaattttttttctttgatcctcaataaaacacagggattgattctgctaagacagctatgcaaatagcatgttaaatattcaacagaaaggaaattagaatcaactctaatgtggtgagatgggtttccccctcaaccttttttttttttaagggctcaaatgagtttcctgtggtgagacaaggggtccagtttgagaaacttctatcaacattaccatgtgtctatgctatgtgtctggaacctgaaccgtttctctggtcctggggaagaccacatctggaagcaccattcaggaccagtgagatggactcgggggtaaaagcattgcctccaaagcaaatggcccgagtttaatcctgcgtccacgtgctaga

SEQ ID NO: 2348 - DNA, 637 bp, Mus musculus
  misc_feature (221)..(221): n is a, c, g, or t
gcttctttttatctctatcaaccctgcattccactgctttgccgttgatggcccttcctccccacaccttctgcagtagggactttccattcagtctggtggcagcggttctggcaacagctcttgcacttgtgtggcaagcttttaaattcccatgcttttgagcagctgcagtcaagctgacatgagtcagtgggaggggcttaggggaacctccaggnagcagtaactttttgacagtctcacaaacagaacattttaagtctaatgactctaaaagctctccctgtacatgcaaaagcaactgcagttttcccaaagtctactgttttttttttttcttttcttcttcttcttggtcttctttttttctttgggtccccagaaagaatcaggtttctgcctatagcaagacacattcttcaaggattaactgtgacctcatagctaaagtggatacaaaataaaatctggagacaactggaaagtgagaaggggtggcagggagacattggggaatacagaagtgccaagctctggctttggcaggcaggcctattgcctaaatagggaaggcaagttattattttctcttcttctactcttactgtactcacataggtgatttccagtgtgg

SEQ ID NO: 2349 - DNA, 728 bp, Mus musculus
caccgcggtggcggcgcggctcgagacttgaagctgagcctctatgtgggactttaaaaaaaaaaaaaaaaagcctttttaaagcattcgcagctgattgaagtattcttgactccctgtcccagaccttagggttgactttgaaaccctgtttctagcccttatgtcgtatgtttctgtctgtgggtggtgggtgtagaccgggcttcccagagcctcctgacaggcccggcactgagcccggctcccgtgggagagtcatgcaaactaagttcttccaagagactttcatgtcctggttattaacaaagaaaaggcaaaaaaatgtaataatggatatggtttggtaaaagtatttttcttgagataatctaacgtttaaaactttattttaacatgtggtgggggatgtgaaagcagagaaataacttgtacatggcgtgactgttctctgtctcaccaactgggggggttgctttccaatgtatagcttaaaaaatctgatatttcaaaccgttggtatctaacgtgtacagtgtaaaattgacttaaaatatcgcagtgctatttttcttatcagcgaggaaatcctcaaggcctttggaagagcgtaagatgacggagatgtaaacttgtttaaagtcacctcggggaggacgggctgtaaactagatattgtgtaatctttaccactgtgggattggttcctctcagagttcaccagaact

SEQ ID NO: 2350 - DNA, 372 bp, Mus musculus
gcagcgttgtaggattagaaagaagtggaaaaaaaacactatgtaagtttgtagaggtcactctcattgaaacacgtttctggcggattcctcaaaggattctaacagaagcctcttgccaggctctgcatccaccctcatgttggaagccctgactagatctgtgtacttagggagtttgtcaaaaacatttttaacttgcagtatttaaaaaaatcatatttactgttcttaaaatgtcattcaaatgcatgtatgtctactgttggggatggtaactagtttttcaaaaaaaaaaaaaaacacacctaatgttgtataataatgcccctatgatcttacgggttaaaaatacagtatttcagccaaaaa

SEQ ID NO: 2351 - DNA, 800 bp, Mus musculus
cctgaagagcttagaacccaaagctagggccacccctgcacttaggccttggctgaagatcttgagactggtgtttccgtggtcattggtgacaggatgtgtgcgctcgagtgtgtaagtgtgggtgtgtgggtgtgtgtgtgtggtctgctcatctctttagggaactttgaggtgggcggtggcatatggaggggtgtcaggttctatgtgacccagtaatgagaagagcttgaaggtgaggcctgaggggccacagatgagtcatgttttagtgctgatgacagaggggccggtcgcatgggatgaggctcggtgggcctcttgcttgttgtctcctgtctcctcaaatggctgaaaacttggagggtctcggttgttttccatgcctggcccctcacagcagcgaggccactgaagagcaacacacccagtgtgtgtcagtgttctcagcccagccctccctgagaacccacatttggctcgtatgtattgtgagcacgttggggtgcgcataagctatcaccatcttcttctcttctatcatccaaatcaaatgtaagaagtccctcacatccgattagcccaactctgtctccccaggcccctgctgggaaacccatacccagcatccctcccctgccctggccctcggctgtgtatttatagatggaaatatactttatattttgtatcattgtgcctataagctctgccaccttggtataaaccctgatgtatgctaaagtgttctggatatgaactgttgtccactgatgctgcccccttctgtacagcgg

SEQ ID NO: 2352 - DNA, 735 bp, Mus musculus
atcatataggcgactgtttcacgcggggcggccggtaccagctttgttccctttagtgagggttaattgcgcgctggcgtaatcatggtcatagctgtttcctgtgtgaaatgttatccgctcacaattccacacaacatacgagcagggagcataagtgtaaagcctggggtgcctaatgagtgactaactcacattaattgcgttgcgctcactgcccgcttccagtcgggaaacctgtcgtgccagctgcattaatgaatcggccaacgcgcggggagaggcggtttgcgtattgggcgctcttccgcttcctcgctcactgactcgctgcgctcggtcgttcggctgcggcgagcggtatcagctcactcaaaggcggtaatacggttatccacagaatcaggggataacgcaggaaagaacatgtgagcaaaaggccagcaaaaggccaggaaccgtaaaaaggccgcgttgctggcgtttttccataggctccgccccctgacgagcatcacaaaaatcgacgctcaagtcagaggtggcgaaacccgacaggactataaagataccaggcgttccccctggaagctccctcgtgcgctctcctgttccgaccctgccgttaccggatacctgtccgcctttctcccttcgggaagcgtggcgctttctcatagctcacgctgtaggtatctcagttcggtgtaggtcgttcgctccaagctgggctgt

SEQ ID NO: 2353 - DNA, 682 bp, Mus musculus
atcatatagggaatgttttcaccgcggtggcggcgcggtcgagcgctacttcccactcccctgtggaatgcaaacccatgaaagccccgccactttactcgttttctaaattgaaaaacacgtgagcaataagcgtgtgttacttctacagtcaggaaagcgctgagcatttttcaaattggtttgtttgaaaccatgaatgataaaatttgttttaattcccacccatctgggccatggtccattaaaccggcattttacagcagtggtggttgctcactatataatacttttgaaggatttaaaatgtgtggttacctacaatatgtcaaaacacagaactgctcataaggttgggtgaataaagaatgtgagaactgtcgcagtgttcactgtcattccagttcccttcttcctaagcaaattcctcaacctttttggactaagcgtggacccatcactcttgctttgaccaaccaacagtcagcagaaaagatgcatgctccacttccagataaacgtctttaccggccagtgtgtgaggagtcttatttcctcttccctgtaaagcagagccgtgctgagcatgagtagggaacacctttatctctgagctgtagtaaaagactgggattctttgttgctgcagcgtgagacccgccctcactgatgctgagcagga

SEQ ID NO: 2354 - DNA, 812 bp, Mus musculus
cggtggcggcgcggctcgaggttctttttttatcatttaaatggtcatcctgatctctgactgtagcagcattttgagaacttcataattgtagcagtaaaattaggagctgcagtaatgattaagaatgttcttcattctttgagagttgtggtatcttaaaaaatagaaccccctcaaaaaacctatggcaatgcattataggaatcatttcagactgcaaatggcttgtgctactctgatatctgtttctaaatgtgtttactaactatagcgttgacttcctggccaaattccaataaaacttttacactaaatgattcctccttagccctagttgctagtaatatgtgcactgtgaccaccccataaactgttaataaactgttcatagaattactgccagcaatagtggcaaatatcgcaacgtttttgtgtagaacgcattaattgtacaccttctgtcgacttccatctacacaaatatatagcttttctatcacaacattaagtgaaattgatgctgtggcaagtttattgagaaactttcataaatggatatccctactatgactgtgaaaacatgtcaggtgtcacatgagtgtcacagacagaaagcacatgcctatgcaatatggcctactctgtatttatttgtaaaaactgaagcataatttaaagtgtatatcaatactactctgagtttctaagagaggtgttcatgcttgtaccaggtaagtgaataaaaaaaagattaagtgctttttctttcattacttgattattttctttaaaatcagtattacaggata

SEQ ID NO: 2355 - DNA, 850 bp, Mus musculus
  misc_feature (630)..(630): n is a, c, g, or t
gcggtggcggcgcggtcgagtgaaaaccaaaatataagttgtacttataatcagccttttaaacatttttgtaaaactctgtactgcaactgaaagaaatatttccttaattggttcagtaagttttaacatttttaaaagcttatatgtgaatagtaaaactgtggagtgatttatccagtggcaatcccagctatatagtcacaaataggagtaatactattctctgaatttgcataataatttagaactatattaactttatcatactctgatatctcttactaaagcatagtttccttagttcacttaagagatctaataaactcagcattgagattccttttatggaaaaattcggcataattttctgttcgatgcctgtccctaggtgtcatttgaattggagttgtaccattctactattgctatagtctcaaacttaactgactctgaacttcagagtgcaaatggaatttgtttccagaccttaaaaataacagatatttgttataattaaacgtcgtcattccctatatctcaaaattatcttctagttaattaaatcatattgacaaaacacgtcaaatctcactttaaaggctaatagtatatatgcataaccccagncaggccatacaagcccatggaatggaggtttggaggtagatagttccttatcttacattattaagaaattttccagtttgtaacaatttgtaattttcttaagatcaacaagaagttaattaattacagggttcgttcatggggtatgaggcagatccaagggctccagtgcctctgggcttccagcacctgcattgtgtgtcatattgcaacacattca

SEQ ID NO: 2356 - DNA, 822 bp, Mus musculus
cggccgcggctcgagtgtatatttgtggatgctgttactaaggtagctttcgcttgtccctataggcctgtttaatttaagacaacagttacatttcagatatgtgcaaagaactgcagaattctcaaatgtaaaagcatgaagcattactatgtgactagtacccgtattcttctgtgaacaaatgtatttaattcaaattagaataggcatacaagtttttttaatgaaaattgtgatataagaatgaagcgtacctaattccatcattgaaaactttttcttccgtctttttagatacaagatggtaaatttccttattataccaattctttgttgtgagataacatctcactgccatggtgggttttaaaggatgatttgggcataaagaaaggaagctgagaggaataattcagtgtgtagctgagattactaaatatacaaatacctcaagttcattgccataaaaaataaacctattgacccatcaattatttagaatgaatacccacctccttcaaatgctctatttttgtatacatatatattttataagaacataaacatgaatttatatttaactgtttaaaattatatttaaatacaaatatcacttgatataaacattatatgcatttagaaatggactttttgaacaatggtactgaattaacttaaaatgaaatatttttcatatgtacacctatattccaacactgtttttagattttctggttcctttacccctgatataatattgttagcagttgatgccactgctccatccagatgtccatagactgaagtattcacccacat

SEQ ID NO: 2357 - DNA, 788 bp, Mus musculus
  misc_feature (580)..(580): n is a, c, g, or t
gcggtggcggcgcggctcgagagtccagccaagccgagtagacaggatagctgtgtagcttaaaaggttttcacttgcatgtggacacaaagcccaaaagcttttaaaaccgtggtttctctaaaatagtctagtttatagggaaagaatcattaaaagtagtggtgagtggaatttaaaacaagacatctgaactcatggaattcacagccagtgggagaaaacctgtaagctggaggtttcatatgagttgggagtagcccttgctgcctagtaagtttctccgaaggcatgagctgtgctagccacctcagaagcagggtttgtcgttccaagccgcctgtgtagagcagactgaaagggagcgaaggctgccgagcttctctggagctgctgtgattaggccacttagggaattcttagatttgtcctaattgcagtgagaagctatggtctaagggagtagggtggggatttgaactcagggctgcaagcattgctaacgagcaatccactgcggaggatttttgttttgaaacttcagtatcatagtcgtgcttaattgcttgggctcaagttntgtgttcatgtgatcctcctgcctcagtttcctagtcctaggactaccagtgcagaagtgctcatgttctttatagacgatttgaccgctgtgtaaaaggtagggattagaaaggttgcactgtagtctggtcctgcaagagcggaaggaatcaagaatgtcttctcagcgggcgtggtggcgcacgcctttaatcccagcactcggg

SEQ ID NO: 2358 - DNA, 839 bp, Mus musculus
accgcggtggcggcgcggctcgagctggcttgagggtcatgagtacctgacaatcctttggaattgtgtataaggtttcgtgcatttttccagtcaaaggaagttagctttcatcggtttctcagactagtccatgccctcaaaaaggaggctgaggattgaaaccatcaagattgaacagtgctagaatatttataatttactcatttgattttgctgcagtagatttctaaatggaaggtggctctttaacaaggtaggttatgatggcctcagaaatactgtattcattgggttctttataaaccctgggtgaagcttagcgaggttgctatttaggaaactgtactatcagctttcctttgctaacttagactcattagcaaggtcactcagaatagagtagcttagaatgagcctcaaagatgatagaaaaataaagatcagaaccctttaagctccatgcattcaagctctcacttgctcctccaagtttgttgttcaggccagaacatactaaacttaccaataaatataaatgctatagtttttttacatatatattttgtataaacaaatttatgtttaaatcagtaactacctagtaaatcatacaaagcttgggatttgtgcagatggttgaaggaaatcagtctcactaatgacaactgttccttaggactttctaagggaattttataaggtcctttccaagttttctgtgttggaaacaatctaataatttcgtcatctgaatttaattgaacacaagattatcaaatttgttacacatgttttaaagacttattttcgattatgtgactgggggtgtgtactgt

SEQ ID NO: 2359 - DNA, 825 bp, Mus musculus
  misc_feature (429)..(429): n is a, c, g, or t
cgcggtggcggcgcggctcgaggctggtcagagcccagtgatctacatgttgaaggcccacctcaggctcctccccgctgccactagtccagttatttgcatttctgacagtggctgccacctttagtgcttcagtcatttctgctactccaggatttctgcctcaacagaggcccaaagcagacttcactttcaggactagatacatagggctgggtctgcgccatcctcaccgggaatatggctggcacatagcacaaccacttagaagacagcctgccaggcatgggctggcctgaggacaggtgtccatctggatcaggcactcagcatgagtagggcggtcctgaaggaacaggcctcaggctcatccccaagggagtctcctggaaaaattacaacctgggctgttcattattagttctccangggcacaggcccaccgaaggccaattaaattaaaaccttagctaggacccaggtaccagtatgtttattgggagccactgatacatagcacttatatgaggaagtacacagtgtacagctcagtatagaacggccaagaggcatccatcaccccaacagctctccttatactcgtggccacccaggcttgagacactggggtgtggtcttcccagacagcatagagaactgccttaaagggcatgattgtgggtgagaggaagcaggaccaaggtttggtgtgaagcaggattatgcaaggaggggtgtaacatgcaggggacggggatataagatgcaaggaggggcataagagcctgatgtgaacgggtctgttgtacagaccagaatgagaga

SEQ ID NO: 2360 - DNA, 822 bp, Mus musculus
gcggggcggcgcggctcgagggcccagatgctctataaactcagaatcctaaatagcagtaccttttcttatgctcaattaaatatatgttgaccaacagttgatgatatttttttaaaggcattatattctgtcacagccctttagggaaaaggttgggtcacatgtccttagaccaagacactgatctgccattaagtcctaagctaaaaactcttgttcgtccctgttgaaatcaaactggcttacgggttaaaaatggaagaaatatcatttaggcagaggttatatgaaatcatagaaattattcatctcatttggcctaataaacagtgtgttctcttcaggatgttagaagtaatttagcataggagaaccttccattagagaatccccaacagttcagtgttcatgagaggacaggaggatcacagggaggacggcatccttaagatctgcttttggaagtctcaaatgacatttggagattttgctgattgtggagaaagagaatttaaaagagtgaaggccaatttgcttcatatataaagtaaatgcatgcacaaagtacaaaacaggtctttaacgtgaaaataaaataactaaaaacaatgtttgctaattaacaatgtgtgagccaaatgatcacattgtaaagctccttgccccctttccagtctgatagacttacttggtttttagaaaaggaaaacatttgctcttgaatcagtatggaatgaaacacacttgaatatgggtgagactttctctgactaggtaagaaatcagaatattaaagctagttctggtttgaccctataa

SEQ ID NO: 2361 - DNA, 814 bp, Mus musculus
atctatcctagtatggttggaatctaaatatatgcgtttccattattttgggaactaattactttttaaagatttttttcttttgttgatgagttattttgatactcatgctaggaaaagggagaaacaaaaccatcttgagattggaattcctgttttattctcctgagatgggagaacttaagcagtctatgcaacccatcagatggtgagaaatagctttctaccattccactgagctctcagtgaccctcatacgtcctcaaatgtcttggcattgattgaggtttcgatcttgatgtttaggaagcattctcgctgcaccacactgtcatttctttcttactcctcagtggatggaaacttggaagaagagtggtactgtgatggtacctgatggagtggtccaaattcccagttgtttcctaagtgggtgagctctccgttttagtattctaaagatgttaacgtgaacttggcaatggaaaggggaaggaaaataatatttaataaaaatcagtgtctactctttccctttatgagtgtgtattcctggttgtatgaagagaaactcatgggttttgtgttgccatgtgaatgtcgagagggatgcttgacagcatgttaattgaagccagagcaagtatgtctgccgtcaggtaatctggagatgccagtgtatgctgagggagtgattagctgatggtataatgaagtcacttacaaagcagaaaggctgtctggccggccgaagaaccaaggaaagcagtgcagcagcctcactcacgtaggtgtgatcttaggttctgaactg

SEQ ID NO: 2362 - DNA, 652 bp, Mus musculus
ccggtggcggcgcggtcgaaggatattgtagtttcagagtgactgaactagtctttcttagaaaactaccaaaaaaagaaaaaagaaaaaagaaacatggcacagtgcaagcaaagtcataaagtggaattgacccctgtaagaaattatgtaatcagggttcagtgattgtttaatatacttaatttcctgagggattaatcaaattgtctagtaagtattttaggaggtttttttaattacagaaaattaaatattttgagtaataaagtcttaaaatatcgtggtttatttaataaatactggctcatttggcttaatgtttctttaaacgtttactgtgggaagtgatcagagagggaataattgttggaaagtagaccattctgcttgtaattttctaacgaggccaaaattcataagactaaaaattcataagaccctgttccaaattttcctcctagtagctgtttagtgattttcttaaactaaagccatgcgtttgttgtagcgagggccttcattgcatccgttgtgtttgttttgagaggaagggtctgactgcagtttcttgctgacctgtccagggtcttccctggggtggcatcccaggcttgtgccacttctacctgtggcttcagctctactggga

SEQ ID NO: 2363 - DNA, 709 bp, Mus musculus
gcggcgcggctcgagggcataggtggcttagggttagggtatagggatagtggttcttaacaagctcccacctctggagatggtggtgtatctggcccacaggtcagtccaaaaaccccagaagcctgtgcctcaaggagcatgcgtactggggtaggaggggagcaagaacagaaccccctggccctgctccaacaggggccccaaaactccacagaaatcagaacaaatgactattacttcagcagaggaccagagggggctctgcacctccatttgtataagccaagtttctctcctcgctgtgctgccattggctctgagtaacccacccatactccattatcacaaaaccatggactttacagagaactgggctaactgagacgcagtggccccagttggtccacatgacattgacatggacagtctttgccctttgtcactcgagattagatctggagttaataagatgtgtgtgcagtcttaaaatcccctcatcctgatttctgcacttggccatgggacccggggccaatgttagctctgcagcctagaactcagtgtgactgctactttgtttccaagtctatggctgctcggtcactcactgtgagagcctgctttgggaatcacatttgggcagacccctctctacagttagaaaggtagatggggaagccatttggggtttagttctcagagtgag

SEQ ID NO: 2364 - DNA, 718 bp, Mus musculus
tcaccgcggggcggcgcggctcgaggacaggctaccagttggctgcagacggacaccggtgtgaggacgtggatgactgtaagcaggtgcccaatccatgtccccagctctgtgttaacaccaagggcggcttcgaatgcttctgctatgatggctatgagttggtggatggagagtgcgtggagcttctggatccgtgtttcggatctaactgcgagtttcagtgccagccagtgagccccaccgactaccgatgcatctgcgctccaggcttcgcacccaagccggatgaaccgcacaagtgcgaaatgttctgcaatgaaacttcgtgcccagcagactgtgaccctaactctcctactgtttgtgaatgccctgaaggcttcatcctggacgagggttccgtatgcacggacattgatgagtgcagtcaaggcgaatgcttcaccagtgaatgtcgaaacttccctggctcctatgagtgtatctgcgggcctgacacagcccttgctggtcagattagcaaagactgtgaccccatccctgttagggaagacaccaaggaagaggagggctctggggagcctccagtcagccctacgccaggctctccgacaggtcccccttctgcaaggccagtgcactctggcgtgctcattggcatctccattgccagcctgtccctggtggtggcgcttttggcgcttctctgtcacct

SEQ ID NO: 2365 - DNA, 669 bp, Mus musculus
tcacgcggggcggcgcggctcgagtatttttttcttctgtatgttcatttacacttctgccttcatctagtaatttacgaacagcattcacatctccatctgaacaagcttctgccagactgcgagtatccacttgtcctgtactgtgtgtgtctctgctctcatccgtgtcagtgcagcagcggcttcatccaggcacagctaactgaggatgtcagtctccggagtacttcaggatctgcaaaagctttaccatcagcagttgacaatttgccaattcctgctgcttctagcaatgcttccagtctcgcttgggtctctggatccactgtgcgcaaatctgctccttctgctgtacttgataagaatatctctgatgttttaaggactgggttatccaaatcttctgggtccaaaataaatgattctacctcggacacctcgtcctcgtcgctcccagaggcaccacctccgccgcccgtcctcagcacagcagcggccaacttgaaatccagcgctgcgtcccctccgcccgcgctgctgctgctgctgctgccgccgccgccgccgccgccgccaccgactcccggcgcgggcccagcctccccaaagagcctcacggtgcggattcccagcccgacccctcccggcggaggcggctccgaggcc

SEQ ID NO: 2366 - DNA, 193 bp, Mus musculus
tgaggtggagaacagtggccggtcggagcgtcttctggacttcagtgactcgcaggcggccggtcgagtggcgccgccgaggcgggttgggccgagcctgggagcgccggggatgtagcgggccaacctgctcatgccacagcgcccggcgcggccggagccggagcctggggaggcgtgtgggggccctcga

SEQ ID NO: 2367 - DNA, 770 bp, Mus musculus
ggccggaggttttgtgtatgtgtatgaaatcactcttaactctcttaacttttttaaaactcgtggcataccaatgttcagatttgccaagctttctctaagacatgtaggatgaaatgtttttgtgtgttaatgcatgtatttataaagattgtttactgctgagaatcactaactcttgttttcatccccaaagtgttgtttcttccacatgctggaaggcttggcttgagtatacgctttctggctttcctttcacaaaggcacgttcaaaattgttcagaaagaagaatggtctctgacagtgaggtgtgatgccagagctttctgaagtttgagcagtgtgtgcagctctgcatgtgtgtcctgacagagtcagatatgtgagccattaaaagaacattgtaattcagagtgtttatttaagtaacttacatgtctgaaatttatttatgtagattccatcattgttatcatttgtagtgcaaatacatgaactgtcttcatttagtcccaacaattatttatttttagaaagtaaatttaaagccaagctgcattcaacttttaaaatagtgttctaatcataagatgtgatcattgtaaggtctcttttaactttctggaaagtaaatggtcaaaaggaatcacataaagattgttttacatttttaacctgtatgtacttagagggtaagccccagttctctggtttctaatcattttttgcacattgattgtttctgttctgtagcttttcttttgctcct

SEQ ID NO: 2368 - DNA, 793 bp, Mus musculus
tgcagacacctaactgtcatatggagcaaatgtcctacatgcttccagataggtgaaactgagccaggccaagtttccaacatctctggggtaaggactcaagccactgtaacagccacatgaacagaggtgaaggttccattcaacgctgactttgttgcgttggttctggaagtgtgcagaaaggtcaggatccagtctactcttctcccagccacgcaaagtaataatcattaaaaagctttcataactacgacaagggccatctggaaggcagccctgcctttgaagtagtctgtttgcccagtacactgaaggacaccatgttctacactgctggcacaagaatttaaactattcacgagtggggagatgtctctgtcaggagacgtcctgctgcccaagcatgagggcctgagctcatatccccagcacccacgtaaaagccaggcataggggtgcatgtctgtaatccttggtagaggagtgggtaaagttgggtagaggcagctgatcctgggaaggtcagtgcccagccaacctcacaaaatgagcgatctgcaagctgcagggttagtgagaaactgatagtagagatagaccaaaaaagattcctgtgaatggcctttgggcctccacatgcatgtgcacacatgtgcccttgttcatgcacacacacgcacacaccagacacacacaaacacgacacataaatattttttacaaagttatttaaggtcagaaggaaggaacatgcagaaaccaaaaatagcaagcgaggaacggtctcagg

SEQ ID NO: 2369 - DNA, 707 bp, Mus musculus
agagacctgaccctgaaagttggtcagggaactgtgttccatagattaagatgctggctgattcatccctgaagctgacttctcagaagactgtcagcttctgctttcatgattcaagatagtcctgttttctgacctcaagacttcagcttttaagctagtgtgctgtggtgtggtgtactgtggtatggtgtggtgtggtgtggtgtggtgtggtgtggtttagtgatgcatgctttttttctttttctttttttttctttttcttttcttttttttcttttgagacagggtttctctgtatagccctggctgtccttgaactcactttgtagaccaggcaggcggatccctgtgagtttgaggccagcctgagctagttctaggacagttgtctaactgtctggaatcctatctcaaaaaacaaaatcaaccacccccaaccaatcaaaaaaccttcagcttttctttccacactatgatttgtttcaggcattctcttgtttgtatcagagttggtgtcttgttggttgcaaccaaactggatggctataggctggagctgtagaagaactcaactgggtctttcatggggaggcttttagtcagggaggcataatcattatccacagtcacaagccctatcactgctttggaaatagtcatcttggtgggttgggcaggagagtggaccagaaggactttgt

SEQ ID NO: 2370 - DNA, 797 bp, Mus musculus
gggtggcggcgcggctcgagtgtgagctagagcctgctctggagcctactctacctgacccatcaccacgccccctttacctgctttctggaagtgttatggttcactctccgtggaaccagtccagaacgtgtgctgttgtccacccctgctgcagctggtggggcttccctctgtccacccgcatctcagactggcagagctctttaccaagtacttcatgttcgggaatctctccttgatactctacccttaccctcacccaatcccaccctttcctaacctcatgaagatttaaccatcaactggcccactgaccatgaagctggtaggggctcttcgtggttcgggagagcctttgttcagcattaagcttccctagtcctagtaaatcatgtctccttttcctggttttgttcaccaattatgtgactggctctggtgacgggtgctgtacagggtacaggttaattgtgtcattctaaactgttgaggtgatctcattgttaaacggttcttgctgggttctctttgtacagttgttactccaggctgatcacgtcacatctctgcgtcagctccagcactaccgagagactgttcggaactgtcctttctttacctgtattgctcgctcttacagattggcctgcgatgcatgcctgtgctaattgaaaaaatatgttttattttccttaaagtgtgctgttatgtgtgaagtgtacatactctaagtgatgtagtttgacaggtttattggttggatgatttatattaaagagaatgctgcccaaaaa

SEQ ID NO: 2371 - DNA, 757 bp, Mus musculus
gtgaagccatgtaggagttaggaatcatgtgacccctcgggtcccctcgtacccacggtctctgcttacatctgagggggatttcacagtgcaggccacagactctgtgggaaggtctcagaggctgtggccctcctttatcagcagtgcaaagatgcttgagtttaagtctgtaattttttgaaaatcagaaaaccagagttacttgatcatttaagaaactggaaacttctttgttggcaagaccttacagtgacatcagtaatttttttttattttatgcaatgaagagaaaagcagaaataataaatccaaatggtcttaacacacatttattttaaggaaaggttagaatgtcaaaagacaaaagttgagtgtaattttttcaccaaatatgggaagatggtagcagatagtcacctgaaaattctaaatacagggtctaaagctctctgaatttgagacctggcacagttgggtcttactgctgcatatcatttttgaaaaatgagatttagtgggagtttaccctttgatttggtcaggatttggtaatgaagtcacaggaaagatttgaccagaatttaatctcccagtgtgaaaactggggcagagcctttgtccacatctcaatccttagagtggcactgggaagggtctggttggggtggagccattgtcactggtaggcttgcttatgggacttcacatgaagcttaaagcctgtctgcacagatgctagtgacaactgtgttga

SEQ ID NO: 2372 - DNA, 721 bp, Mus musculus
ctcgagaatttgataagttcttgtattttattatttagtgtataaagtcttagaacacaaaatgctttcttacattttagaaaaaaatgtattacaagctgatgtggtgacacaggcctgactataatcccaaagtttacaaggctgaggaggaggatcacatgttcagggtcagcataaacaccacatgttacgtgagaccctgtattaggaaacaatgaggtaggggactgttgtattataagatggctgtatgtgaagaatgatgtaacctaattatcagggaactgaacttgaaagtgactcataagttagtgtggcttctcatgaaaacctcattccagatttcatgctacttacacatcagtcctcctccctgctaccgcctgcacctttacatactgttagcaatcgagggttcctttgttcttccttttgaaactagattctaatgctagtagttcagggggtagtgaagtgctacacagtcatgcctttagagacaggcagcagctaagtgttcccctctccttgtgggagccaagcgagttcattttcccattagatgccatctcatcaggaagctagaatgacactgaaacaactcagtaatggagagtttccatgtcccactagtactcaggagcctttaagagaccaaaggtagcctgatcaggggctctcctttcctcaatagtgcttaagattattgtgctgtgtg

SEQ ID NO: 2373 - DNA, 762 bp, Mus musculus
ggtggcggcgcggctccgaggtaaactaggaactccttctggaatgactttattcctgtttaagcttttagcttggcttgtcacctctaataaggagaggaggagggtatgtgtaggacatttaaaaagattctttctcttgtagtctccatgaggtcaggctgtatcaggattgcaggaagatccttcagaatctctgtttgcgtagtgcaccttcctctgagcacctatggaaagcttatgcaagcctgaggcagctttgttccatccttcagttttgctctttggaagccaagctgctaggaatggtccaagaggcctgcctccctcccgctgtgctggctcattttatttggatgtcattctttatcctgctttcaggggtgtatgctgttgggtatacctggaatccaagagctagtgtgttgagtcaacctcagaggcagggtgctgactgtaggcttgggatgcagccagtgaactggcccttagtaatgtatggaatgacttattcctgtgacccaactcttttactatccagtgttgtgaggaagcacaattgtacccgagactacagacttagccccaattacaaaaaagtttcgggttgttttttttccttggaattcttagattgctgtgtaaattcttatacagcaatagaaagcattctaaatagctgctagtctgctggtctcagtattcatttattagagactgagttctgtgattatttgaccctattaactttggggggtgggg

SEQ ID NO: 2374 - DNA, 744 bp, Mus musculus
aggagaaggagctggtggagcaactccgagagagcatcgagatgaggctgaaggtgacccttcatgaagacctgggggcggcactcatggatggtgtcgtcctctgccacctggccaaccacgtccgtccgagatctgtcgccagcatccatgtcccctcaccggctgttcctaaactcagcatggccaagtgcaggaggaacgtggaaaacttcttggaagcgtgcaggaaacttggcgttcccgaggaaaagctctgcctgcctcatcacatccttgaagagaaaggcctggtcaaagtgggcacgactgttcaggcactgttggatgtcaccgtcacaaaagctctattcacatgagaccaagccctttcctctgggtgggctcagcctcttcccagagcagggactctggactctgctcctggcacctgtacctgctccccaactcacctccctgccaggtcccggaggaggaactgcactggcgtggtttcagcctaagggaggactcaggaccttttagagttggcctgcaggtttcaggttgggcaggtgttacctgacagcgggtcagggagctggcggagaactgagtagcagcacatcattgcctttcaatccccttcatcccttccacactcaccaaccgcattaccaaatgccaagcacaaccatttcacagtgagtcgcgtgcgtctgttttatcaaaaccaaatccttgcagaaccagtagggggagggg

SEQ ID NO: 2375 - DNA, 617 bp, Mus musculus
aattcatcgtctgaaccctcggattcattcagtctcctagtcgctctgttgctagccaagcaagcccctggtacatgggagcctgagtgttttgagaaatagaaaggagatcagtgcagaataaacttgatgaccttagagatgtagtcagagcacttgtctgcagggtagctcagtgggctgttactaaagtgatggcttcagtttctattccttgtccttcagccattactcccccttccctttcaagtgtcctgggttgaaggataaacaggtgactatctcagttccgagcccgagggtttagataaaataaaatgacacatacacctgtgcggcagatttggcagccagatgtaaacagctgcagcagctgagataagaactatattagccaaccccactagggcttgtgggatctcagagaaccagcgtctagattaattgaagttgggtgtcagcacagtgcttgttttaaaaggggacgagttggatatactgtgacaaggacgcaggaacaaagtgtgtgaaaacataaaagaccacagccagtcctggagagcctacagagatgagcctcgagagagagtgaatgatacgtgtggtcagaggtgggg

SEQ ID NO: 2376 - DNA, 758 bp, Mus musculus
  misc_feature (19)..(19): n is a, c, g, or t
ctagctagcactaccccanggcagtactgctcctgcgcacacagttgacttgagacttcaaggcagaagggggaagctcataacctcttctgtcccaatcccaggcccaagggaaagtagggaaatactaggtgtgtgtgggtgggaggtgggtggacaccttcggggaggaacctggaaagaaagttctcaagtcagttaaggaaaaaatagaccaaagttcattgactttagaaaaaaagcacatggtggtgtagttgggagtattgagtcgatctgagatactgaacaaatttgattttggtttgaattaggtagatattagggttgaataaattctccctgaaggatcaaggcagtaatgtatgtgcttggcctggttacacagaaagggtggtttaaatcccagtgaatggaaataggaaggaggaacttaaaggggagtctttcctagagagttttatgttcttctagatactcatctgccatccattctagttttaggggagactgcctgttgccctaccttttcctcatcctttttaaggattgagctcagctaagttaagatgtgattttttttttaaatatttttttttaaagcaagttcccttggggaaagagaagagtggtaagaagcaaccttgtatatggggtttcttcaggtgaacgggtgcagagtgatctattttttaactaattagcaatagctatatgtgggtttgagtgcacctgagaaggggtggaggagcccagat

SEQ ID NO: 2377 - DNA, 713 bp, Mus musculus
  misc_feature (135)..(135): n is a, c, g, or t
ttctcaacttcctcaccccagagaggttcaacaacttggagggcttcctggaggagtttgccgacatatccaaagaggaccagattaagaaactgcatgatttactggggccacatatgcttcggagactcaagngcggatgtctttaagaacatgccagccaagaccgagctcatgttcgagtggagctaagccccatgcagaagaaatactacaagtacatcctaactcgaaattttgatgccttgaattctcgaggtggtgggaaccaagtgtccctgcttaacatcatgatggaccttaagaagtgctgcaaccacccgtacctcttccccgtggctgctatggagtctcctaaactccccagtggggcttatgagggtggggcgcttattaagtcatcagggaagctgctgctgctgcagaagatgctgcgcaagctgaaggagcaaggacacagagtgctcatcttctcccagatgaccaaaatgttagaccttctggaggacttcctagactatgaaggctataagtatgagcgcatcgatggtggtatcacgggcgccctcaggcaggaggccattgatcgcttcaatgcccctggtgcccaacagttctgcttcctcctgtccacccgagctggtggcctgggcatcaacttggccactgctgacactgtcatcatcttcgattctgactggaacccccaaaaa

SEQ ID NO: 2378 - DNA, 814 bp, Mus musculus
gcggtggcggcgcggctcgaggcggctcgagctttaatcctagtacccaggaggcagaggcaggaagatctctgtgagtaaaaggccaacctagcctacaactctagttctaggacagccaggacctcacaaagaaacacttgtctggaggaaaaatagataaataaaatccatcctgtccaaacacaaatccgtctcactaacacatgtgtgtttcatggcacggtacctgtggagtggcttttcatttcaatcctgcgctctcactgtttctactgaagcgcccaggcagaagagagctacgctcaggtgaggctgaactgagtgtggcaaagctaagcgcccttcgcacagcgctcttgctggaaaactggcattcgcagtgggcgcacacaaatggaatgaaagtcattgtgtaaaaagtgtaaaatatttgaggggccagaaggtcacaaagtacaaaactgtccagagaatttcctcccgcactgtgcctgtctcctgccttgtgggccaaatgtatccgttgggtggagtgaccgattttctattcctttgctggtgtcatagcaaagtcagaattttttttttttaattggtaacgtttcttacaaagttactttatggtttacaagcaacactgatgcagaaggatatgtcgattttcttaaactaagtagcagcatttggtttacagggcctgggatatggtagatgacgtgggatccggtccctcatccctagcactagatctaggtcctagggagatgccgccattgtgctgttccctgggtgtaccacagatcagtgaaag

SEQ ID NO: 2379 - DNA, 618 bp, Mus musculus
ggtggcggcgcggctcgatgaaccaactagcattcttgatctagcctcctaggcacaacacagcacttgattaggtgtggctgctaagtaaaagactagagatcaaagatcatcaacttgggtttctacaatatctggcagaaatgactggagaagcctcagtgaaagttatggaaaataatgctcgaatctggatcaagagttcccagcagaatgtttttgagaaataacatccagtatctcattccctgggcaggcatctttataccatggtataaagaacagcggccttggttgaaaaagtttatctggtcaggacagactgctagctagtctgctcccctaaagataccacagcctgaaaacatcacatgagtttccctgcaccctgggcaactggtaaggacccacccaaaggcctacaacaaatgagataaagaattcctgtctggggctcaaggaacaaagtggttatcctgacaaaagctatctttagcatttgttatccagtctctgtgttgtctgtcttgtctctgtaggctcgatcatttgagcgatcacttttgaagttgatgtacatacataatttggagaattcagtagctgagatggtctgtg

SEQ ID NO: 2380 - DNA, 375 bp, Mus musculus
gggactggaggagtcaagggtggtgacggaagctttgcctcttccttctcctggctagcatcgcttcttcctcagccacagctctctcagtctcctcctcttcctcttgcttgtagttatcctcattgtcatctttttcttccttctcttctccctccttctcctcctcctcctcctcctcctccagtttctgctcctgtttctttctacacgagcccctttctggttcatctccatcttttctttggggggcatcctgccagctttccccacgttgaccatgaccctgacctgattctagttcctgggacaattgtcccatcttcactttcttggccttggaaacaaacttgatcataaggggaagtccgcctc

SEQ ID NO: 2381 - DNA, 580 bp, Mus musculus
ggtttagatgccctgcactgaaagaaaatcgccttactcatttatatctttgaaatacacacatatctttggaatctggattccttactgccgtgtggaagttaatgagtcactggaaaaataatgtaattttttttttaaatttactttcgtcaacctttgaccttaattttgtaagtgcctagaagtgctgtgatttcccagttgtgagccttcttggtcctacgttcctctcctttggagcctaagttggcggttatatcaccagaggactgcccagtgtgcatagagcatggacggctcagctcctgatggagccctcaagggttggcatcggggaagcagggcagctgaaaccattgggaaagcagttgatgggaacagaacagcaagtcttgttttcagcctttctgatttcttttgctgtttctggcagccatctgtgtatgtagggtcctggctagagaaatggcaacccccacctctactgtcgtgaaagtctggagagctgccatcttctgaccatgcagattctagggtctgttcatctgtcttccttatgtttgacttcatgagcggg

SEQ ID NO: 2382 - DNA, 429 bp, Mus musculus
  misc_feature (336)..(337): n is a, c, g, or t
gattctagatcaagttacattgataactaagattagtcatcacattcaggcagctcccgcacaggtttcccagcgtcatgttgctaattgtacagtttggcacgacctactgagtaaggctggtagagaaccctgggagcaacggctccttcagaattcctcaatttttcattttatcagcacatagctgtgagcacttacagggtgccatgtgaaactttcatatctggtgccaagaaagatcaaaagggatggtagcatttctttttccatgtttctttgattcttaaattacgtagcctaggctggcctggaactcaacgtaattctcctgcnnctcagtctccccaagtgctggagttatgggcatgcactgccatggccagcaatgtttctgtcttaaacatttaccctttattcatactggga

SEQ ID NO: 2383 - DNA, 512 bp, Mus musculus
ctttgtacttgaaaggtccaatctgccagcttctctaagggcagtgttctgtatagccagtcacccccatcccaccagctctttttggtagctgtctgcttgtcacatatgtatcctcacatcatggtggctcttgagttctgaaggacagacttgctcagtttgaactaaggtagcatggcgtggacagagttcaggtttaggttgtgtttctgagacagggatcttgccacgttctccagactggcctagaattcctgggcataaggaggccttctacctcagcctcctaggttgctgagactagaggtgcactcttccaccatgctgagaagcgccacctgagacagcagtgtaagagtcctagaacctgttgccattttggggtttagttcttttgtttggctggctgactgcagctcagctctgccctgagagagcatcactgtgccagggctctcatggtgagaatactgtactgtgatgctgtctggctatcagccttttgtgac

SEQ ID NO: 2384 - DNA, 316 bp, Mus musculus
ggtggcggcgcggctcgagaatgccaagtcacttccccttgcttacaggcatcctgtgcctttgctcctggcacatctaccttctgtgtccctaacttacctcttttcttctagttgggactgattgtcagggtctaagacatgcagtgggacgtggaaagggaggccttgtgtatctcagagagtggtttcagaagctgtttctagtgatgccattgctttcttgaaacagagctactcgtgcaggtgttttagatgcgtcacaagtgcgcgcgcgcacacacacacacacacacacacacacacacacgaaaaa

SEQ ID NO: 2385 - DNA, 777 bp, Mus musculus
ctatactcagtgtcacactcataacctgtgattgaaagctgccctttcagaaaacgaatgctagtcagaaggcaatgggttggcgtcctttttaatcagtgtgtaactattataaagctacctgttcatcatacacttggtttttttttttttctgatgtttcctggttcttaaaactggtatcataaaatgaatctctagtctaataattaagctacaaaatttattaaggaaatgccccactcattcacaccagtggtgagcaagtatgtggagtcccttctgtctgtggcttacaataacactgtgtgggctccgtgcctcataaatggcttggtaatggtgagtatttctgggatggtttcttaaacattatcatagtctggatttttctcacattaaaataaaacaattggtgaaacttagttatacttggctggtgtttaaattaaccttcagcagttattaaagtgggaaggtcagttaaattttaagaaagggagataaatgccttcggggtttcatatggatttatttggtggtaggagagcagctgttggagttaaagggggggggtgtgtaaggtaggtaagggtatttttggataggtaagggttggcatgaattagtatttacaggtgattcagactaatgcatggctctggtataaatccttatattaattgctgtcttatgaaacttttaccaggacctaagaagaattaatgggcaaattaatcggtcctccacatgacttcctttatttttttttaacct

SEQ ID NO: 2386 - DNA, 718 bp, Mus musculus
gcggtggcggcgcggctcgagggagacaggagagaacacggagaccagtgatgtccttaacaagacccctcagctacagcccaggtccaaactgcctctggccactcagaagatgaggttggcttggcacttcactgtccctgatatctggaggtgagatggcagagaggggcaccagtggagccaggattggggcctagggaagcccccaatggttctggaggcagggataagtgtgaagggctgggctaggacaggatggacaggaaggctgggagaactaacagttggatactgaagttgctactgcggacctgtggctcccttggccagccatgttttgggaaagagttcacatcttaggtttgaaagggagcatttgagtcttctcactgacctcttcctagcagcttagatagcctcagacatgactgccaggattcctgatatgccctggctttggagagtccctagggatgcccactcgggggtgtagggaagacactggctgtgcgtccttctaggaaggggctttcaggagagagagttcttgtgctgtctgagaagtgcaggggagacaaatgaatgcagtgtccatccagctctgggttttctttatcctgcctcccgagacttctgacccccctttcccagcttcagatcttggggagatccatccaaggggttcagccctctcctgcctccatgccttgggtcc

SEQ ID NO: 2387 - DNA, 754 bp, Mus musculus
ggtggcggcgcggctccgaatgtggattgatattgttgcttccattttccaggctgacctaggacaggtcgtccactgaactcttcatgctccgatgcctctgccctctcatagaagccagacggctcaagcaacataacactcccttcccctaccaaaaagagctacattgtatttgtttttttctagaaataggtataccatttcagaattgagcattggtcctcaaggcttcttttcagttcactgtgtgtggaatctgtcacctcttttcagtgtataccatctgacccactgaggacatcttggacacttgtttgcccacctgagggttcaagagcctttcttgctctgtctcagtatagggactaaggcatccccagattcttcatgataggtttccttttcccctacttgaccttctattggtacccatgaaaaagcacaaggtcctagctccctgtagatacacactccagttctgttgggtagactctactcctaacaggggtcctagagggttctctggaggatgggaaaggaacagtctcatgtcctgccaaatagtagccagcagttgccttacccctgcctgctggccatgaacccacattctcacggaaagggctttcagagacccctggtttttctcagcactgtaccattttgtgtaggaagcaggtcacaccttgtagccaggtctaaatggaagtgagacagtgaattctctgtggactttttggttgtggggggg

SEQ ID NO: 2388 - DNA, 779 bp, Mus musculus
agcacaaccaggaagtgaacttgactttccatttctcctggggctttttaggacagacccttctgctcttgttagacctgcatcttgagtcatgctacgattgctaaaatatgctgaatggattatttttaaaagtttctttgggtgttttttctatgaagagttatatgtgatttttctgatatataactgtgtcagtggtctaaataatgaatggaggggatatgttaatttaaaggggatctgataggaacattaaaggaagcttttagtcagcctgtggctagatttattgatttggtaagcaaacctgtattgtttgctgactttcagctaatggctaactctggtcaaagaatggcttttgcttaaggttttgacttattataaataagattaagaatatcttagtaattaggaatcctttaaaacatagaacaaatgtgcaaataagactcatctttttataagaaaaacacataagcctttatcacttattcatgagctaaagccattaagataaatcaaattatcgacgttcaatctctgaactttggatcgttttctagatccatataatagagtacttctttcctgtgaatctgatgctttgagatagatctcttaccctcttttcattaaaagtatttgtcatttttaactacagtcacaatccagtaggcaactatatttttatttcggcagagcaaatttcagagtccatacttaattataagacaatcctgaagacaaacaatgtttaaaatagcctatttagc

SEQ ID NO: 2389 - DNA, 619 bp, Mus musculus
aaggccaagacagatggagggtgtgggagggctcagacacaacaagctctaagatggcagaaatatgaccgctcacaaaaccaaatcggccaagagccctgcctgcgtgtgacccagattccaaagggagggcttcctagttctagacatgtgggccagattagcattggctgtcttttctgccagcatgaattaagccctcataaggtgatgggtcctgtctgaggatgaggggagcaaatgagcacagcagggacagccgcagtcagtggcgggccagggaaggtgtcagtgctggtacagctcattatcagaaaggttaaaggttttttcctactaaaaccatcctcactttttatacatgcaacggactgtacgcgtatatacatacatatctactgtagtttaaagagtaataataatagcccccatatgcctccagcctgccatgctgcctttctccctaggcaccccatgtgcgcttccctgaccttctctttctccctgttgaatatagaaagcctcaccctgtgtgtggatcgaagccttcctgccctttagcggtttgtctccatgtatgtattcttaaagaaaaataaacagaattaagccgcaaaaa

SEQ ID NO: 2390 - DNA, 788 bp, Mus musculus
cggggcggcgcggctcgagatagaaaggataaataaaggctgtggcacttagtggtggttggccagcatcctgctttgtccttgagtgagcagtgtggtgatgtctgaatacttccaggtgtcgtgtggaacctgagaagtattgagatcatgtctctgtccctgtggtttcagtaagtagattcttctatgtgtaagcactatttctctttggaggttcatagcactaagctgccaagaaaaacacgttcatttgcaaagaattaagagtgtgtgctaaacacttgacattgttctttgtttctcagaagctagtgaccagcaacgtggagtgttcagcaagtccccaccatgcctgcagggtggggctgctcccttccacacccagctttccttaggggtggagacagggaatggtgggacctgtgttgttccgtcccgcagaggtctctctttggagcccatgtataaggcttgacatttttctgtgagtagatttagaggcagttgttccaagtgaattctggcctcagtacaaagaatccagtggttctgacactcgggacaaaagctctggtatcccctgtagagaggctctgtcctgctttgctccagccactcacacatagttaataaagtggctgaagctcctcccttcccagagctgctgtgctggggacgctgtctgcagcccgcccgagtcccagagatgggtgtgagcagtcagataaggctgatctgggagacggaggaggtggcatgacacaaggtgttgtcaggagaagatg

SEQ ID NO: 2391 - DNA, 755 bp, Mus musculus
tagatggcctcatccagtcacaggtcttgtcagaatctaaccattgattcactgaggagaccctactgccctgaggttccactgaagcagcttttagtgagactagggcaagaatataccgaatagcttctgttcaaggtttggttccagagactctaccatttacaggactggctggagttacaacaacctcttaaagagggtagggcgggttctccagttagaccccctaacctcacaggtgagtagtcctaacctgacagccttagaaacacagttgccgagtacctgagagcacccagtggcccgccgcctcctattcagcccctctttaaagacgacagacggttaagccatggagaagctgttcaggtagcacggggccatttctgcccccagcttgtcatgttttttctctcaggacccactctctgaccagtagacttgaatttagccccaagtgatttactaaactcagctcagaagctcacttaaaaataggacctccacatggtcgtgctaagtaaaaatgaagaccccaagttgcacagggtgctgctatctcaaagacaatactttcctttgaatagaaagctgtgccgtccaccctgcaatgggtgctagccaacttgcttgagaaagtcaggagcaagcattttgagttttaacagaatgtcctgaacttgtcttttaagtaaacatagctgctttattaaaagctgtgactactaaagccagtcacagcatcgtcactg

SEQ ID NO: 2392 - DNA, 768 bp, Mus musculus
  misc_feature (473)..(473): n is a, c, g, or t
gcgcggctcgagaatatattttgaatgccaagacacacagggaaatataacaaccagtttatttgccagcaaaaaagtagaataaaagttttggacatttataaattcgttgtgagttgagctaggctcatgtactaagactgtgctttctactgccaatctgtgtgacaacattaaccatatcaagacgtcataggaccttagtgtatattctagtcacacagcagagcccaagccaagtgaccagctacatagtcactgatttatagaagagtccagaaataagaaggtagggcccatcctgagctcactccctggataactatggtaaccacaatagtgctgacatatcattttgaaacagatcatggatggctgcctcaacagtttcgaaaacgtcgatagccatcatatatcagcagtaacgccatgagtttgtctgcctgttttcaacacaattatgatctagtttngtagtgtatggatgttttgcctgcatgcataccatatgtgtgcagtgtcttcagaagacagcgttaggtcccctgggactggagctacagacagctgtggacctccatgtggctggtggggattgaactcggaacctctggaagtcagtgctcataagctgctgagtcatctctccagtacctccatggtgcgcccttggtaatagttgcagtctggtcttctttatgagacaaaaaaattaagggactggggagatggtccatggtcaagagttcttcctattcttctatagct

SEQ ID NO: 2393 - DNA, 749 bp, Mus musculus
accgcggggcggccgcggctcgagctggctgattagttactcttgggcttgcatgtgcagtgcacttctagatgtctctgtcagtaggggatctgctagcaagctaaaatccagttatcaccccaggaatgcggcccctgggcaggccctacttgctttccctccaaattacaaaccagatctgtctgcttatctctcacctgcaccatggtcagctgagcccctcttgttggctatccattgtctgctagcctgacccagttccgacttccacaccctgagctggcggaggatggtctttcaggccccttaagccttttcagcatagacaatctttctttccagtttacactgaatgtgagggagtcaagggtagactgtggggttgttgtcctgcagacccttctctctgggcatagaagcctctttcctagagaagccattaaaagggctcatcagcctcctggacttagggctggtcatttgcccagacctgccagttagcaggaccttgctcttcccacctactgtggttggtacagggataaacaatgtggcccagtgctataccattgagagtcattgggcatcccatctgccagggatcctgagctgagggcttgtgggggatgccagggcagggccagggtatgatgtgtggcattcagtgcaataggaaaatgaaaggcctgttgctcaaaaagcaggagaatgacactccgcatgatctccagcaaaactgttttagt

SEQ ID NO: 2394 - DNA, 881 bp, Mus musculus
gggtggcggcgcggcgcgagttcaggcttagaggcccgctggagaaaggaagatctgaaccctggcctatggagtcaaaacctttccccaagagcccatgtatagacccagattgctatgcaaatagtccagattcagttatggctggctacattattcagtaacttcccaacaggtagcacaaatattccttatggaaaaagcccaggactgttcagtagttcctcctgtacttttctgctggctacagtatggagtgccccatgggcacaggcccagccggagaacagaacggagggctctgggaagaggcagctcactggagagcctacattccttacacaagtgcctaaacagagtgatgccaacactccatctgccctgtccatcgccttcatagacagtctacttcgtgttccatcaccctttggggagggagctctttgcagacagtgtgttgtcaacttgggtacatttgggggcttggattaagggcactactccaggagggtccaatcattcaccagcatttgcagatgcccatagggaacaggtggctgtcacaactcccagcaacaagattttgttttctcctttttctttgcctcactctctccagttgggttttaagctagaatgaaaagcagtttcggtcctttggtatttatgtgccattcatgaaataaaagcaagagaatgctgggcacgatggcccatgtctgtaattctgttatctcagcactaagggctgaagcagaagatttgcagttcagggtccacctgggctactcagtgaattccaggccagtgtgcactatgtagcaagaccatggtctccataaaaaagaccaagaaaaatgacttggggtgaccagatcttg

SEQ ID NO: 2395 - DNA, 781 bp, Mus musculus
cacacttagtttgcacatatttgtacttcctgccattttgattatatgaccattctaggtcatacacacaaacggagatatgagtatgctaggagagacaaaaggatgtgagttcagggcacaggtcactagggccagctctcaggctttggaaacctatcactctcaccttgcatagggtatgaagactgttctgtgtctcaatcaaagacagtgtcacggaaatgtgctcatatgaggtgatacattgaggctgtatcattccacctttgtgcctgtgagctgtgttttcaactgtaactaataagctagagcgaaggaaggattctcaggtgtgtgacgctgagagttataactggagaaagaagtttgtccagatggctttctcactttaaaaattcttggtggggaaatagatgtgggccctgcattcttctgtgttgaatggtgtgttatatgcacccacacacttgtgataacttcctagcactgtgtcccaacaccatgctggccttagtagtaaaattttttaggtatttgtagaagacctgactttctgcatccctaagagaccacatttctctggaacattctcacacttttggtgttaagtgggtaatctccagtgtattagatcttactgatctcctggtttaaacttcaaaaaagccctagcaatgggtctgtcaccttgtcacctgtccactcttaatgctatttatcagcctcttagtcatatagagttgcacctcttgaaccaagtattgtatttactatggga

SEQ ID NO: 2396 - DNA, 860 bp, Mus musculus
gcggcgcggctcgaagacagtttccaattttattttcttttaagtgtccccagacagctggcactttctactcttacctgttaagatctaatcccagatgacatctgacagtacaattaacttttctcattatactattttcaaacattcctcggccagaggatggctgtctagataatgcctgacatacagtgaaaagcctgtttcatggtgggcgatgctggctctaacccactttaaactcaggttgcagagaccgtgatgccatggcattagaggcctcaacaccctgattcacaaaagtttggagtaagctttccttttcttctgaagtagataccatagtcccagatgaacttgatgtgagaatactgtttttattcatgtcacatcagcacagcgtgcctgtgtgttaactttaccagactccctgcaagcatcttgcctctcagtatgtgttccacattacctttgacagaggaactcttgagactcctgcttggaatgcagcattgaagcaatacccctgaaagtcaccgttcatcccagttgaggtagaaaactacagttggggccgggggaggcggtgtggacagccccattgttagggaaattatcagctttcccccccagagagctaaacactttccatcctttgccacgtgctaaggctgagttggatgctgaggcttgcagttcctctgtgccattccctctgtgtgaccaagggcttctggggtttcagtgctgagtgcctgtctgatagtcagatcgtattactttattttaatatattccctgtgttcatttgaaaattaatattctgctatataaaagttaaggacgcttcataatgagaa

SEQ ID NO: 2397 - DNA, 698 bp, Mus musculus
cgtcacagccatctgaccagctggtgagttttaccagagacttggaatgaagacacaaaagatgtgtccagccaaacctcagaagcacacaatgtttgacatagctgatttatgatccaaaactctcttcccaggtggaatgctagcccaagatcaacactcagaaatttaatggtaatcaatgtaaagtcagatcagaaaaatcaatcactccaggaacaagcccagggcagagcagtgccttggcaggactccactggagattatctggttatttgcatttgacctctgaggtcaatgtaagcataacttgctgaggcctggagaggggtcgtctcccatccaggttcagccctggccagagggatctggaccccatacttatggcacaggacagcaaggcctcttgacctcctgtgggcatcttgaggaaggaggaagaggacgagaggatgaggttgaggagaggcaagtagcgtggccgtggctgagctaagccagcagaaccaattccaggcaagaggcggactgatttatggcacccaagccttcttctgcctctgtgcagacaaggctgacttccatgggaacttctctatagtgacagagtccctggtcaggcaagtgggaaggtgatcagaagagagggactccctatgtgttaccccctttatgttgttggtgtgtacacacatgtg

SEQ ID NO: 2398 - DNA, 642 bp, Mus musculus
  misc_feature (95)..(95): n is a, c, g, or t
  misc_feature (502)..(502): n is a, c, g, or t
tcaccgcggggcggcgcggctcgagtgggatgtcgttatgtttagaaaacttgagataaatttgtatttgtgaagttacattccatccattccanggtgggggttctttaaaactctccttaggtggaaggaagaattttctcatttgcagaatatctggaatgcatgtgtcgccttccgtggcatgcacttctgtaacctgcagatcataaccagcaagtgtctgtttaaaagcaggaagtagagcagcatttttttaaaactctctttgtgtgacacattatctgtgattaaaaaaaaaaaaactacaaagataatggatctgtaagtatggaataatcagacatgatgttataagtcggcctccagcatcaccaaccccatgagcaaagagaaaacccaggcctttctttctccaccctagggggaattattagcttctggtggtcaaagggtgatgccacagtcagtattcccttgagcttgcctatgatgtcatttnggctggtctgagggtggagtgaaggataggcccatctcaccggtaatctgagataggacagtgaaggcaaccctgacctcactgcctgttgacccaccaatcacaagaactggctctggctggttttgtctgagggaatt

SEQ ID NO: 2399 - DNA, 744 bp, Mus musculus
cgcggggcggcgcggctcgaggatttttctcatgggccactgttttaaaatgccttggttgggggtggggtagaaacaatgtctacccacctgttcaaaggacaaacaagagtgggattccagagttcatactgggaagcccagtgagcctattaataaggcttctttacaaagcactgggtgagagtttacatgcaggagcatgggtaaccctcaagtagccacagcagaaagtctgcaccccacatggatgtgatgccctcggagctgtgtagatggagttctcttctagtaccctactcaaaaataatccgcccctcccacaagccctaaggccatgagcaattagggttaaaatcgggcccatctacacagctatgggggaatcatgtccatgttgggttcctatggttagatttcacatttgactttcttgaatgtattgattgcatcaaggaaaccctatctcaaaaaaataaaaggaaatatctatcccttttataggcattcagacaccaagttgcccaactcatagtgtatattttatcagagactgaaaatagcaaaaactggagttggtctaggctggctataaaatagctgagctggttgagagcaacaacaaagatgtaaacatccccttagtggtgagtgagcagttgatggcattccgcactgctacaagccgagatgacgacggtgccaaaagaacccgtgacacttaaatgtggctaaggggtttcc

SEQ ID NO: 2400 - DNA, 527 bp, Mus musculus
gcggggcggcgcggctcgagctgcactgcaaggcagtttgctcagggacaccacccttgactgtggtgttgatcgcccatttccatgtagctagttaccccaagacctagggacgggaaacaaacacttctgcatttgtggatcaggaatgctggtggggcttagccaagtgcttcagagtcaaggtctccgagaagactgcagactgcagttctggggcttgcatggaggaggacttgtccggggctgacatcagggactgcctggtaaccttggctgcttgtttctcccagtacaactacagtcaaaagggggcactgctacactaaggctgtcctgtgtattcccaaatctcagaagtgacacctcacccatcccactggtaaatgtgaatcggtatgtctaggccgcagtgctgaagtggttactccaggattactctaaaccttggcaactgaaaccacagggccactttagaggctgcctactgcagtgacctctcaaacagcatcttacatcctcaaaaa

SEQ ID NO: 2401 - DNA, 688 bp, Mus musculus
ggtggcggcgcggctcgaggcggctcgagagagactgtatttttatgaaaggaaaaggtttttaatctagggtaggcagtcatggtggcccagcatttgctgtggataagataccgccatgttcattgactccggtgtacaatcaacagtaaacccctctcctcagcttgccctccgtcctcactgaacgtccgcacacagctggggcgggagtttgtgtttcttcttccccggccctcagctccttagaagtcttggaagggagtggggagggagggtggaatgcagaaaactgaggtgcgggagaggtaggttctaattagtcaccccatctcccttctggccagacctgctcccattcagctgtgtggggagagtaggagggaggttctgtggggttgggggacacaggacttcttaggggcatagggacttactatgtctgaagtcgtcaggcagctggagcaggcatagaagggactcaggacactaagagctcagccctgtctgtgtctactccaggccaaggtcgagcttggttgtggatgaaggaccaggactctgtagggtttcatcagacctgggtcctccctctgggactgacctagtgggaggagtggagacgggtctgggcaaagccatacacactctgggaaaagatttccaggctcagcgtggactgtgtgtg

SEQ ID NO: 2402 - DNA, 765 bp, Mus musculus
agaaacttgtctcaaaaaacaacaaacccaaaaacaaaccaatacaacaacaaaagaatcacaaacaaaataaaaagaaatgttgactcctcaacaaattgagtttttagcagctttataatttttggtaaaataccaaatttacctatggtaatttttttctaagcttctttagccaaaatgtaacttctcatgagctggagtaaagtaaggctgaggcatcttgggataactatgacttcactgctcttagtgaagcagccatagtgatatatcctgtagctccaatacttggaaggatgaggcaggagggatgcttgagggagacctcagctagtcagtcaccagagaactttaaaacactattggctatggttaatagacccctacaaaacaggggaatctttgctgttgttttgaccttaaattgaatattgacctgcctctcccttctgagtactaggattgtaggcatatgtcaccacacctcacctaatgtaaaatatttagatttcagagaggaggggagcatcatgctgggattgaacccagggtctcatacaagttatggttggtgttagctctctaccactaagttgtctgcatttcaaactgattttatatgcttgatgatgaatgaatttcaaggctctgatgaaattatttttttttaagttctcaagatactggtacttaagaagttaagctttgtattcagatgaaatatttttttaatgtcaagatggcttttattatatagacata

SEQ ID NO: 2403 - DNA, 821 bp, Mus musculus
cgcggtggcggcgcggtcgagaaggagagcctatagttcagtgcctgtttaggtgctgaggccatagggaagagggtagggtcttccctgtttttatcccttcagggtcaattacatagaagctgcttataatactagtatagctctgtggccctttgctcagtcactgaggtttgatttctcatcctctttccctatcatcatactcttcccaggaattagcaagaggggtgaaatctttcttaatcatggtaaagtattagccttccatctcctcccttaggttctgccctgtccccctttcttaaagcctctacattttacatcactgattgccttgtgtccttccaagacttttttttgttttagttttttgttttaattaactcccatcctccagctgtgggcccttgtagacactagccctcacgccctaaggataggaggaaagaccctgagttcagtgttctttaccactggactcaaactctcagctatcagtagagtggggatcaaaccagtacaatctagcttcctctagaccttgaggcactacaagcagtcattcatggatggtgtcttattccacagcaacctgaaacgggtggattagtggcaaggctggggtaaaattaggagacagaagtccttatttgtcggtttatttgtcagtagaccaaaatctgaactccctccattgctgaataagtatttttcctgcattatgagatatatgtatgggtagacatttctttttaaagaccccgagataaatgttttcctgccttggttacctttcctttcccctttaagaggaatta

SEQ ID NO: 2404 - DNA, 581 bp, Mus musculus
  misc_feature (55)..(55): n is a, c, g, or t
accgcggtggcggcgcggctcgagtgacaatctatgctttaagtttcattaacanaatggagtggcatccaatcctttcacaaacaattccgagcaggaatttcttgtctagaggctgtcttgtagtgattaagagagggttgattttgttgtttactgtattaggtgaggaatgccatatttcttgtcagctaacagtacttgtctgagacagaattcaaggggaatttaaaaaaaaaatgggagaaaaagaaacctaactaattaaaatttctgtgcacttggcttctctgaccatattgattttatttggcttaaattggaaacaatacgctggatttgaccagatttggacccttggtgagaagaaaagccctatatagtccatgtttctctgggttattctagtgctgttggcttacttcttctgcaaattctgaatcatttttcggtgtgtgcattattttacatctgctgaagctaaatgtgttattatggccactcattaaaaatgaaacaatccatttctcttggaaaaaaatgacaagctttagatgatgaaagcttaaattatccatcac

SEQ ID NO: 2405 - DNA, 242 bp, Mus musculus
gcggtggcggcgggctcgaggcggctcgaggcaaaacgcacagagtggcctggactcccgactccctttctaggacactgtggacctgctcctcacccctcctttcaaccttcctgggtacatgatctgggaaacggggccctgctctcttctctttctcctttcgtgtgtgtgtgtgtgtgtgtgtgtgtgtgtgtgtgtgtgtgtgtgtgtgtgtgtgtgggggagggaggggagggggg

SEQ ID NO: 2406 - DNA, 518 bp, Mus musculus
cctgcccaagggcatccagaggcaacagtcccttttcctctgctgaggcaggagccaggcccagcgtggtttggtccactttggatcttgtgtccccttctcaagtgcagtatcattaatctcttctcgctcctatgacaagtgcgtgaaaaaaaaatccacttacatgttcttcaaagccacaagagaagcaagggcctctagcgacagggccccaggcaagaggaactccaccgtacacttcagatgctcttcttggcagctgttacagggcagaggagtgatgccacaggagccaggagggaggagtgagccttctaaagctgaagacaagtgatattccatcactcagtttcttcaaaacgtgttagctaaggtccagcagctgctgggaatttcagaatcaattaagagcttacttttataatggaaattgcttggagtttggggttcgggagggggcgttatgtctggggttttatttcgttcgttttaaatatttaattttattttatatg

SEQ ID NO: 2407 - DNA, 596 bp, Mus musculus
agctctctcccatgtcttactttccctgcttttcactgtgtaccgtacatcctggttttaggagtttctggctcagcctgatgtctgcctgcatctccaccatgtctgaccccctcctagaagctgcatctaaggtcttgcttctattctagccactggaatatggcagaaatgatgtctgtcatttctcccatccctactgcattgctcaccacagcacaaggcaacccaggaaaaccttgatattaaagtatggaggcctgcctgtgccagagccagagccagagccagagccagagccagagccagagccagagccagagccagagccagagccagagccagagtcagagccagagccccagagcgcagagccagaggcagaggcagagccagaggctgagcctgaggctgagccagagcctgagccttgagcctgagccagagccagagcctgagccaggaagcttgagtcctgtccaggcctcaggtctgggagatggtgaacgggatcctcttccacgtcgaggggcctgtcccagacgttaaggacctggcgatatcgctgcttacttgttctaggctgctaaaagtct

SEQ ID NO: 2408 - DNA, 587 bp, Mus musculus
  misc_feature (124)..(124): n is a, c, g, or t
gcggcgcggctcgaggggagacagtcactcatgaaaagacatactgttttccccctttcaacaaataaaaaaataactgactcttccctgaaattcattaaaaaagaaaaataatgacttaaanatttggcttctttaagctttcttattatattcttgtggaaaccaaaatcacactttaactaaagtgtattttaaatgcaatctttcaaaatttttataatacggtgtctgtgaaaagcagaggcagatgtttgctggccagtgagtggaaggacatttctgggtcttagttctgcctcttgtagtccagtgtcatagatgctgcagctgtgggtaaatgtaggagcctgtgggctttcactccagtctttatttttggctagcttcccctctgcactgtggaaaggagcaagtaaaattgagatgtggcatttcagagatttgtcgtgactttatttaccctgtgttcctgagtatcaggaatgttttgagtggtttgaagagcagatccgatataatctctggctgacctaagttagtctgagaagcagtcttctaagataaacaaacgctgcttgactctt

SEQ ID NO: 2409 - DNA, 704 bp, Mus musculus
agagacttgtatagtgacttgaggtggggccgtagaactgaggtgggcagtatgtcatctttatttgctttgtgctattagtttgaagaggagaaaccaggagaatccttccagagggattcttagatgttccatgataatgacactgatgtgatcaagagaaagaagtgggattcccttccaggttgtgctctccagtctcagaacaatcaaaagaccaaattccaaatgtcaggttaacagaacagtgtgtctacacccctgcatttcaacatgctgaattgtgtgcaggggacaccatgcaggggtatagactgttcaccagcctttgcttactgctgcttgttgacatgtctcgttctgacaccatgcatattttttgtttcacaaacattgcttttttcagattcttagtaagccgccttgccagcaggagatgcagagtctgtataaacctctagctcgctggagcactcatgtgtatatgtaattgtaattcttcattgggggtatttgtatccctgccacatatcatctgagtacaggtcgggtagcttctgggtgcctgctgtgaattgttagtaaaagttcttatgtttttcccagaatggttgtctgaaagctcttttcccgctccttccctaaagaggtaccacaaaagagaattactgaccagcttctcagtgtattagagctggaagagt

SEQ ID NO: 2410 - DNA, 840 bp, Mus musculus
  misc_feature (546)..(546): n is a, c, g, or t
gcgcggctcgaggttttgaagagagtgcattttgaagttagagcctgtgaaatagagcatggttggtatagcagcgtgtagctgtaaaacaaaccatctaatgttaccactgaccagtggagtagtgagtttcacccatgcagaaaacctagttagaaacagatgggaaaatggacttgctaactgaccaatgagattcctccaggctcctcaggcctctgacacagccatctccttaatgcctgtagtctctcacacctcaacacagaagagtaagcctatagtcagatgtctctcccacagggtggtgtgtgtgagctgggtgtggtgatgctggtttgtaatctagcatttgggaggcagagacaggcagatctctgatatagagagttccaagccagtcagggttccatagtgagatcctgtcttaaaaagctagaacaggtgaccatgaggactctactcccatcccacacagacgggaagtctccagtgtgcaagctgggagagggtatcgtgttggattagaagtttaggattccactngccagatatctaaaccattgcaatatgagacatcgttacctaaccaggacggtgggaggagtataccgaggatcaacagcttctctgtgatgtgagcaagcatggcctggagtctcagccctagggaggtggttgggcatgtgcagaccctgccaggacgacaaggggctatgtggtcttccatagcagcatgcttcacagaaagaggacagtgtcatacgagatgattaggagacagtgcttgtatggttgcagacatggacaccttactggtccaggttatgctctcccggt

SEQ ID NO: 2411 - DNA, 797 bp, Mus musculus
  misc_feature (112)..(112): n is a, c, g, or t
gcggtggcggcgcggtcgagaagatggagcccttagctacagttgaatctctggaacagtatctgctgaaaatggtggcaaagcagtggtacgactttgacagatcctcatntgtttttgttcgaaaattaagagaaggccaaaattttatattccggcaccaacatgactttgatgagaatggaatcatttactggattggaacaaatgcaaaaactgcgtatgaatgggtaaatcctgcagcttatggactcgtagtcgtcacatcatcagaaggaaggaatctgccctatggccgcttggaggacatactaagtcgagataattcagctttaaattgtcacagcaatgatgataaaaatgcctggtttgccatagatctgggtgtctgggtaataccttcagcatacacacttcgtcatgctcgtggctatggaaggtctgcactgagaaattgggttttccaggtatccaaagatggacagaactggacttctttgtatacccatgttgaagactgcagtctcaatgaaccaggtcaactgcaacatggccccttgacccagcgaaggatgaaaagcaagggtggcggcatgtcaggctgaagcagatggggaagaacgccagtggacagacgcactaactctcgctctccggctttgaactctatggcactgtgaatggcgtgtgcgaagaccaactagggaaagcagctaaagaagcagaagctaatcttagaaggcagaggcgcctggtgcgctctcaggtcctcaagtacatggttccaggagcacgtg

SEQ ID NO: 2412 - DNA, 904 bp, Mus musculus
  misc_feature (523)..(523): n is a, c, g, or t
  misc_feature (642)..(642): n is a, c, g, or t
catataggggaatggagctcaccgggtggcggcgcggtcgagcaatttcccatttttctaatctggatctaatttgtacttagtctctgaactcccttgtgcggggctttagacttggcactctcacccttaagcttttgtgggtaatcttgatcttgttctgtgactatttcaaattttgatatcatttaattctagatacagtattgataaatattgatatattgatagatgtagaaatattttttctcctgtttttgttttgatgcaaatctcaaattagagagaccttccctctcacttgtatgatctaacctgtattcttgctgattttatctttgatgtttttgttttttgagacaaagtctgttatcttggctgacctggaactctctttgtagaccaggcttgtctggaattcacatagatccacctgcctctgcctgggattaaaggcatgtcctgccatgctgggcttgatggctctttagtacactaatttccattttctacttcttcagtntgttttgtaagtagtagttcatggtgtttagtttgtctttcatgtaaattgactgtatctgggacctttagaaaagagacattagcacctcctcagttactggctcagatgactctcantggggtcgtcctggctcttctttcttttctgattagtcattccttccaacttacctgtagatattttcactccccaaatctttctaaacactgttaatgctggattgggtctgagattgtgtgaatattcttcgtattaagaacaggatttccaccattgatatttgatataacttgatgtgatctattgtactcagtccaaaaacatcttgcattaatttgattcataagagcattcatgaaggctcttctctccttatgt

SEQ ID NO: 2413 - DNA, 892 bp, Mus musculus
  misc_feature (682)..(682): n is a, c, g, or t
cagctctgcaccggagacttagttcactttccttgaactgaacgtggttggtggtgtaagaagagctgctgttagtgagcggcggcatcctagtcaacattgaacttgagttgatgactcaggaaaaagcacgacttttcaacagtcatgttggacatatttagtgccaaatttcaaaagactgaaaatgaataatttaataaggaataagtactgtttcttaatttttaagtggaattatgttaaatgttacctactattagtgtgagtaatgaattgagagtaattttctacacagcttataggaacttgacaattctgcatatcccactcatttctttgcctgttttccttttagtaatctctgtgtgttcttttttggtgtctttccatgtttcttataacatttttacttacaatactttcccttgtgttatcagcatgtcttgcgcttcctctttggaagtgggttattattacaaaagcaataggattagattgattgtgtgggagatgagaagacggtgatttggcaaggagggtgtgcttacgttcgacttattcgtgttttaacttactgtatattggtcttaagtctgtgatctttgaaagatccccaagccacttatttaaagagaatttaaagatgttatttggagaacaaatgttacttaaagatganaaacttctgaattctcaagtaaaagctaagcaatttcaaaatttgcattactgcggagattctgaaacgtctctttgaatgaagagcatgtgtacatctcattggtcactatgcctctctgtttggatattcctggttgtataaaagtttgaataatgtactgtggtgtgattactggaattttatccttttaacaatccgaatttttcc

SEQ ID NO: 2414 - DNA, 359 bp, Mus musculus
cggggcggcgcggtcgagaggagacatctggctctaagaacagagttcatattttatgaactggtgcacaggtgccaactgctgtcatagttactgccatcatcattgtatccctgcaaacttctcagacgtccaccagcctttgcagagttggtacctagaatctccttttctttatctgtttcagtatacaagtgtgattttctgctcaactcctggttactttcaggaagctttttctgatacatccctcccacatccactcaggaatatgtcttgtgcttttacttccttattttttgcatccgtaggattagcaaaaaaaaaaaaaaacaaaaaaaaaaaaaaacaaaaaaaaa

SEQ ID NO: 2415 - DNA, 612 bp, Mus musculus
gcggtggcggcgcggtcgagattttcacaaacaaaagccaaatagtccatagccagcagagcaaacattcaaacctctgggctaataacatgtaagatctgttttaagaagttacctctcaagaagagagctgaggtgatgatctattctccctctcttggtggaagtgtttaatgttactattgtttccctatatgtaactgctgtaatttcaatatcgttgttttgtgtattctggtattgtaaaactgtacttattcttttaatcccattccctggggtgtgggtcccctgagttatctaatatcagagtccacctgaggagctagtattgagtatatactgaggagctagtaatctcaactgggaagggctggagttttcaatgggttcagatttgcttcctattgtaattaagtgtaaattaatggcatcccttaaaaattaataacacacaagtttagtgagaagtacagtgattgtggacagaattctgaagcaatgaaagatggctattggaaaaaacagagtctcccaggatgatagcaaagacatagagctgcattaaggctggacccagatataaattggaacagtagcaaacaaaaccta

SEQ ID NO: 2416 - DNA, 297 bp, Mus musculus
agggggacaggtgtggaagggagaggaccctaggttagaaagcatctatgtgtatctggtccttcattaccagacttggggtacttcatgtccatgacctcaagacccctggaattccctttgtggattcatccatggcctcttttcttcttcttcttcttcttcttcttcttcttcttcttcttcttcttcttcttcttcttcttcttcttcttcttcttcttcttcttcttcttcttcttcttcctcctcttcctcttcctcttcttcttcttcttcttcttcttcttaattatt

SEQ ID NO: 2417 - DNA, 820 bp, Mus musculus
catgaaagtaaaagaataaccagacaacaacctccacattcccacctctcccatccaggtatccatggcaaatatcagtcaggcatggcagctcatacatgtagtcccaacacgcgggagaccaagggaggcagacacatggatttgaggctagctggggtaccttgtaagactctgtctcaaagacaataaaaaataaaaacaaaaaataaatagacccaggtgattcaagcaattttttttcaaacctttaataatctgtaggcaccacagtcctaaatccaggctccccctatggtttcatttcaataagacagacactttcctataaatggaaacattattttcctcaaggcaattattcaaacatgctccttatattaaggattctgtaaccacacttttgtaaatgccctctgtgtaactttttcctattacgcagttctttttcatttgatcttctgctggtgtaggggccaatagacttgtgaatattctctggatgtgtccatgtctaagtgtatatatatatatatcaatgtatatatttttttccagctaatacctcagatgtgtgattgtttaataagtaccatactgtgtgcacagagcagggcttccattggtgggctcttactttaaaaattgaccttcagtcagtagaatctcatcagggtgaaatgttttcagttgctctccatggtttagtgcagattcttaccacaaggccctgtgtcatgtaaaactgtatttctctgagcctcattcagaagtggctcttggaatgacctggtgtagtaagtccttaaaactcggggtg

SEQ ID NO: 2418 - DNA, 743 bp, Mus musculus
cggcgcggctcgaggacagatggttggccaattcagacagtcctctctccaagtcaacatggtaagaagggggttacagtgttggtggggatgactgatctggcccagcaaggggagactggatgagtacttgagtggagtccaggcacttcagtgtttatttcctgattaaagtcgttgggaaattacaggacaaaatacaaaaggctcagacccttcagtaatgaagtctgtctcactctcccagtttaaagaacaaaacaacagagtttactgaggaaagcggggatatagaacagggtgatgaaagtgattggtaattaacaccaactacactaccgtgaccagttacagaaagagctgtcactgccatgatgtaatcttcgttttattaagattacctctaaacatacagtgggtatattgatcaagtgttcttattcctctttattcccttcccatgtaacctaagatattgacttcgtattttacttaagacctgggatatcaggaggagtaaagatcatctcttggagaagaggattactgcattttattggttgtggatattttggagtggatatttcatgctacagtaaagccaatgttacgtagtaggtggtgtctttaatttggaaattaagcgtggtttaaagagctctgtgtggttccagatcggcagccaaatcgatttctgatggctaattgcaggtatcaccttcactgagttaaaggatgtatgt

SEQ ID NO: 2419 - DNA, 811 bp, Mus musculus
cacgggggcggcgggtcgaggaaaatcttaaaggactctatgatttaaactctggagtcaaagctagtgtgtgtgtctgtcttgctcctgctaagacatggaaacaagtatggaacctccagagtgtttaaatggctattgaaatttataatggcccttcaattcttactatatgcttaatagtgtgctaaataagtgctcttctgtcttttattagagcttctcagaaaccctaataggcaagtattatcttgattttgcagatgtgaaagctaagaccatgaaccagtgtgagattccaaaccaaataagcttgctgccatggtctagggtgagggtgctgtcctgtgcaaatgttaagtggatatcacactgtatatttgctgagtctcttttcctataggttgcagagcatgtctgcagtttctcggttgttatagatttcctacccaaccgggatgatgatgcacagaactctaaagccagtagtgtggcaacagaatagcacagtataactcagttgagacatgacttcaagactcgagacttggtagaatccttttacttggccatctgagtagaaactaggagtagctttaagaacaaaggcagattctctaaaggaattggagatatgacatcactcctgagcagagcatattagaagaaagcaaactgcatacaataattttcagtttccaaggcaaccaagtggagaacacatcacaggagaccaggaaatatggcttgttcatacaatgatgctactgtgacttcaaaactgatctcaagtatctagaatctgctggga

SEQ ID NO: 2420 - DNA, 725 bp, Mus musculus
gggttgttctaaagagcctgccagaagcctttggatcagcatgcaggattatgctgtcagtaaagattgggacagtgcaactttaagcaatgagtcactcttggacactgtgtctagatttgttcttgcagcactcctcaaacacacaaacttacttagtcaagcatgtggagaaagccgataccaacctggtaaaagcttatcagaagtgtatcgttgtgtatacaaagttcgaagtcgtttacttgcttgcaagaaccttgaacttattcaaaccaggtcatcatcacgagacagatggatcacagataaccaagactctgcagatgttgatcctcaagaacattcctttacccggaccattgatgaagaagctgaaatggaagagctggctgagagagacagggaggatggccacccagagccagaagatgaggaagaagagcgggaacatgaagtaatgacagctggcaaaatctttcagtgtttcctctcagcccgagaagtagctcgtagccgagaccgagatagaatgaacagtggggcagggtctggggtccgagctgatgacccagctccacagtctcagcaggaacgacgggtcagcacagaccttcctgaggggcaggatgtgtacactgctgcctgcaactctgtgatccaacgctgtgcgctcctaatatcaggagtaagtcctgtgatcgatgagcttcagaagcgaaggg

SEQ ID NO: 2421 - DNA, 749 bp, Mus musculus
cattatcatggcatctcttccctccacaacagaaacttacttgtgttgctgacttgtattagtctgccagtttatttggagtgcccctggtgggactcagatccgggacaaatagctgaggtgcatattttacaaaccaaaagagacctggcttccaggttctcccagcatccctcagtccccacctgttatagggcatggctggtatagcccatcctctatcctgaactttctagcccaggtttgggcttcccttcctccagaaggtcttccctttatagtccagacatttaggtctttctgctcctctctctccctgtgtgctctttctctgtcctctctcttctgtctccctctccatagcaacttcccctggcctccttccctgagaccagtgaacccactggagagtagctctccaatgaacccacctttgtatactttaatttggtggctccccagtaaactacctttgtacactttaatttggctgaattggctcattttatcaactccaaatacaatagtgatgttactgaatgcatctcatggtgtgtggatttcatcacttttctatttgtagcatactgcaaagctcttcatagaataagacatggcatttttcatgcaacatttagcataactgcataatataatttttaagttcatctcttgttttctctttagcctgtggcaatgcatattatatagcttcccttgatcatcttcatgataccaaattaatagtg

SEQ ID NO: 2422 - DNA, 672 bp, Mus musculus
gttctaaaaactaggctggctaacattcagtttaaaactgattagatgaaactgttttagcagtgtacagattttactacctggctttatgtactgtgatttctgtaacaggcaaacagaacatcccattttcattattgtttctgtaaaaggacagatatatttgatcagcctattgttattgttaacctgtatcaatttatagcttggtataaacttcccaagtattgagaggattctgctggtgaacattatgggtaggcatataagaagtatgatctttattaagagatgtctttcaacttaggactagtgaaacaatcttttttttgtttgtttcagagctgaagaaaaaaaaaaccaaaatgcacatttaagatcttatgtactggtgcatgtgagccattatcttgtcttattgaatggatcgatgctgttgattgttgaaatgtgaaatgtgtcactgttgaacttgtaaatatctgccagagatgaaaaatattttaatttatggtaaataaagatgtataaaatttagtatccgtctgcaatgcagaaatataacatctcagatgttaaatatggtgtctcctgagggatgtgtcattccccccttgatgtatctagctacattaagaatgtcaaatttctttggtacagtataaaaataca

SEQ ID NO: 2423 - DNA, 312 bp, Mus musculus
aatgtggcatttatatgacttaatggattgagctccaagtttataaatgtaccctctcttcaaagcaaatttttggggccactgtaaggtgcatatagagaaattacctctgaggatgacatgctaaagtgttcatgagagctgcttcacttccaccctcagagaatcactgtttgagagcaaggggaagtttctttttttttttttttggatagaattcacttatagtttaacaggggcccaatttagggtatgggaaattgagttagggaagacaagtgaatgtgtttaaaaactaagggcagtggggtg

SEQ ID NO: 2424 - DNA, 720 bp, Mus musculus
acgcggtggcggcgcggtcgaggcggtcgaggtttgagaccagcatgctctacacagagagaccctgggagaaagcaaagtgtagtaagaggatgccattctgcagaactcgtgttaattacatgaaccccatggttaactaaaaagaacttactgttcccagagccaggaatagaaaagaagctacacttctcttgtaaatggtatttagaacaaggtgttcgggtaaagtctcaactagtcagaggtttcagcagcttaaattgctaatatttaagaagttgattttcaggaatgtctgcctgtgcctctctccttgctgccattgatcagctcagcaggaatcatcatctttaaacgtggagaaagctctcagatgagcgtggacaagctcccacccagaagtcctaatgatacttggttttgactgtgctgcttctgtgttaggtttcttctcagcttttagccactggggttttctgcctgttctgtacctctctagaagatgtcgacttggaagtgctgcctttcacaccagtgccatggtgtccatatagttgagcttgttgctgatccagaggtgtcccctttatgctcacacctggcacatcactgacatgagcattcaacagtacatgggtgagggtagaggtggggctagccaacagccctggctcaattggcagggcctgcaaaggccccacttgagggccagacact

SEQ ID NO: 2425 - DNA, 645 bp, Mus musculus
acgcggggcggcgcggtcgagccgtgatgaagtcagtgtcccctggttatttaacaagttcccccaaaattgctgctctaatgggttgggaatgtagagctatgtaagaaacatgggctgtgctgacagggaactcttggtccagacaagagaagcagagacagccataggctgtgcttcagtggcatttggcctctctcagaagtctcctgaggaagttctgagaggtttcagtctgggccacttgtgatagatgtcatttgcaatgtgaccttggattgcaagaatctcagagcaggctcagcatctcagcctcatgtctgttaaggaaccaactggaagagaatgggaggtgggttgaggagatggagtcagcgtggtgtttggctccaagctgagtacctagagtagccagtgtccttcccttcctttgttgtttcctggtctgcttggtggtatgttgtcagccatctgaactgagatctcttaaaggccatctttttaatttagaagacatttagataagaaaacttcctggaacttgcttccactctgtggttcactaggttgcctgaaatatgataaaagttttaattttccaggtgcttcatacttgtttttaggtgagattagactatccatgtt

SEQ ID NO: 2426 - DNA, 494 bp, Mus musculus
gttggttctctcccaatgcaggtcagctgctgctccatggtaaatgaaacccgcagtctgggaaactcctgccatccttgggaccataccctcctctaacaaatttctgcaactgatgagtgattcccaaaagacatccctgcagacacacaggcttacaaagaaccacagaatgttgaacatttttgcaaaatagctttgtaaatactgaaacagacttccatgaacactatcttacctttggaacagaaattattccttggctatgggaaatcaaattttgatttgcaataactaagaacataaagaaagaattagaatgggaattttctgtctcatagtgacatattgctatgtttaacagtgaacactcaccagctcagctctcacttgccacaaccgaataacctctctcaaagtaagtccagtccatctgtgtgcatatacaaacaagagacaatctggaaaagacttactattaaaaaaaaaaaaaa

SEQ ID NO: 2427 - DNA, 767 bp, Mus musculus
cacgcggggcggcgcggtcgagcgcaagcatgtggaccctggcagacagcatgttttctagctttcattttatttaccttttgagcccttccttctcttgtgtagacgttttgaaagtactcctgcctcttgacttttattcttttcctttctttatattttgtgcttgttttttgcaaagtatcatgcccatattgtgtggtttgttgtattaagtttctccaatggagcattaggggctcattcaacaccaggagactcgggatgacagatgacaatgctatttcaacctccaggaattggtcatctccttgggagacacccttgaatgagacttgccagcaatttagaagatggcaacattgtccagaaaaggcattaggtgattccttggtccctcttgctactttgggagaatctctccacatcctgcctcctccttcccttccctgttccagctcacaagtggatggtacttttggaaactgaactcttgtagtttagtttttctattgtaagtcttagcccttaatggctgagttgtctctttaaccaggatggcacttttaggaatggtgactgttacagtcatggctgggtggcctgatccacggtttctccatcctgtagtcattccaaagaagaaaatccacatggcatgtacatctgtgagggttgggtctattaacgagggggctttaattattcctgttactattggtgcttattttccccgctgtatatgggggtggggaacgggctggggt

SEQ ID NO: 2428 - DNA, 765 bp, Mus musculus
  misc_feature (36)..(36): n is a, c, g, or t
ccaaggagctcaaagcatgaagggcagcatatccanggaaaacgcaggctgacagtattcctttttggctaaaatactttttggcttctcccagctctgccagtgattcagctatgccaactggttgacctcacgttctctgctaagagacagcactccctgtgggtgctagccccagtgcattttcatggtgagaggctaggatgctgtcagctggtgcaaatgggtaatcttttctaatttaaaattacttttagggggtagttagacaatttatatatatatataataaagtggttattatatatatagtatatatacattctcaaatttgagtttattctggttgaggtgaatgtaagaggaatatataatttaatacaatgtgaacagagctctggctttgtttcagccccgcctactatgttagttttaacccttcgtttcccttacagaagaatgtcagtagactttcatatatagtaatcattgtgtccaaatgcaagcaaagcaaatcacagtgttcatagctctgcttcataacaaacacataaaccaaatgccataaggttccttcaactgtagtgggaaaccattttggagttttagtttgttgtccaggtacactgggcagcttgcggtgctgaccttcctacacagtgtattgttacactagccaaccccaaaggagcagtgcttttcaaggtttttactggcttataactctaccttcattctgtactgtagaatcatacataccaggta

SEQ ID NO: 2429 - DNA, 720 bp, Mus musculus
agagaattctgtaaatctatgttaagtcctagttaaggggtaagtctccgttgttctgtgttacatccttgctaaataaggtttcttgtgtaattctgagtaagactctgtttcttaggtctgatgtaaatgcttgtaaccccgttcacttgatctgtatccttgccttgccccttccattttccttgtatccttctaacaatgtgtaacagctaaccctctcattgcttaaaacaccttatctctcctataagagggacttcaagaggccagcaggggctgcctctctgaccggtctgcagtgctgtccagtccgggattaacagctaaatatagcttgctttaattggtgagctgtacacttgatcttttctcctcaggaatctcaattttaacaataccccttaaagcctgtaatcagttttaatagtaaaatatcgggaaaatgccctttttaaaaatttacttggaacttttagaagcatatttggcacatgtagtaaagaggtcaaatagccttgaccgtgaatcacttgtcagctgctggtagcagctggaagcccaacatattccatatttggccagcatagcctgtggtttgaacactctgctatatcctagtttcacttcttagaggtgaaattcttggtttcctgttctctgtgttcaaaacatgtctgtaagatttttttaaagtaagtagttttctcaggttaagta

SEQ ID NO: 2430 - DNA, 629 bp, Mus musculus
gtcgaggaaaagccaagcaggcccttaataaccactgtgtttaccagaagagtcagtatgagaacactaaagagaaaccttcgagatcatgatagagaagccttaatacagctggagctgtccctaaccgtgtgtctgcctctctcccaggagtgcaagcacgcatggtgacctctgttgaggtgccgttctttcagctctctacttcgtaattgtcagtagtgtgagtcactgcaacttgtcatgggcgtaattaattgggtttaaaatactgaacatttttaacctaggaaaaagtttcttatgaaagagacaaattctctcctgagttcatcataatatgggtttgtgtgtttggggactggccacaattttaaagatctaattatgcgtataaaaatgggaattattggaatttcacaataacagatttaaacagtcttaaattgtgtatctcctttattgtaatgtattgagaaattttagagaaaccttagttaacattttattaagtgccaatgtcagaatataacagattatagtttcttatgggtgacaggcctgcagttcttattgtggaatgtttgatgaaggaaaacctctcctactggtcacttgtatatgtaagt

SEQ ID NO: 2431 - DNA, 694 bp, Mus musculus
gcgcggctcgagtaggactgagcgggcgctgccgctgtgtgagcgtcttctgcgccttcggtaagtgcggtccgcgtccgctgcttggcattttagacaccagccgggagaacggatggagagagacagggcgagctgtttgcagagccaaggtgtttacagcttatgcttttatgcgtgttcttttaaaatcgtgaaaccacagctgtgcgtttacaaatctgaagaatttgggtacagaaggaggaggaggaatgctcttagaaatggagctaaagtactgcgtgctctgtaagaaaaaaaaaaaaagctgccaaacaatgaagacccaagactcctgccctctttctgtccgggacctcaaccccaatatttacgctcccactactcagagtaacccgatcccaagcgtttgtttgcatccagcctttcaggattttgtcggtgcaagtgaggagtgtgttatagacgaaaattaaagtcctatatagaatatagattttgggccagtagtatacggaactctccactctttttttaaaaacatactttatggttaaagtgttacgtgtttagcatgggcttcacactttcagtagcgagtcagttaaaagcttatgcgtatgtgggggattgggacgcagttctatagctcaagctgagatagagccccctgtggctgtggaagctgacc

SEQ ID NO: 2432 - DNA, 598 bp, Mus musculus
  misc_feature (542)..(542): n is a, c, g, or t
aacttcctctcatcagcccatagtttcggatcaaagttgtggtgttagagattagtaacagctcttcctgcagaaatgcagcccattctggttgtcctcacccttcccttggatgccccggcagctgtcactcggctcagaaaagtggcaagtcctagagaaagttatttggaactgaatcctcctctagcagtcctgattcatacttcccagtgctgacaacccagtcctcctgatacttttaggcatattctagaaaaaacctgttcgtgtagaaaatttatgatctgccagttttggtgcccaccctgattccaccttctagtatgttggcatggaactttagaaaaatctgacaatacagaataaagacatctgattgggcagaatccacttaggctttaattcttgagtagtctctttttgatgtagatgtttctggaccagtttgtctaagtcctggctcttattggctcaaatgaaatgttatcttcactttgtatattatgtataaattagaaaatgaaacgtgtgaataacantgtatgaaataaacctggtcttgtgtttttctctagataaaatatccccctaaaaa

SEQ ID NO: 2433 - DNA, 701 bp, Mus musculus
cgagtgcatacgccaacccatctgcgcatagatgattctgggagtgccgccttcctgagggggcggagccataggcttctcacctgaggggagacctcagcacagaagccgggttctgggctctgtgcctgtggatctgttcagcctgctcctcgttcgcttctattctgatatcagggatgctttctgtagggtgtctgtcagtcatgctcttctcgctccgactgctcgtcattcagggggaaccctcactcttcatatggggacagataataattggctcatctggacatcccaaattttcttgattccaatatagattttttttcctttttcttttgggggtagagggagagagacgggagtgatgtcatttatttttcttgtgtttaaagaagcaaggactggctgtctcacagcatactaatgctttagacttgatctagaacccttgtagcttttggatgtgttttatttcttatctctttgaattcctgtttggttgcctggcttccaatggaggtgaacttaacaaccatacttgaatattccgtcttgactttgtaaactgtggctacttgaaatgaagtttatctggggttgatggatgaatggtaggtttttgcaatgtctcaaggcaataggatgtgtattattaaactgtagatatcttagtacagtaaatttatgctgataatttt

SEQ ID NO: 2434 - DNA, 788 bp, Mus musculus
ctttgtcttagttcgggttttactgcactaaagtgtcctaggggacagcatgagctttgctatctaacaggcatcatggattagatagctactggttggtccctttgccagagagaagggaagtgacctcctttggtagggaggaactagtttcctttggacctatcattccagcctttagttaatgataagggacaaagtactctcttctataactgtgtgtcagttaaaaactgggactttgtggtcagggctcatgaaggctacaaagctggtcaaaggctgggagtgggcggggcgtctctggtgtgctgcccaggtttgctggactgtgtggagctagtgaggtgcaggtctgtttgaaaggagtaggtcggaatgctggcctacagtggaactcaagctggtaggacattttgttagaagctcctggtacgagtcagatttcaacaaggtcagggactgcggccattgtggtgtagttgattggagatctgcactgaagtcctcattatagaaaaagcagttaaccagtgtctgcaaacagctggagttgacccacgtctttgagccatttgcaaaagcttggggacccccaaagtgagtctgggttaaaagcatgaatgctctttcctctgtccctggctggatagttggtcagcaacgtgttcagcacaagggaggagcactgcgtaacagtgatcagtgcttttccaaagctagattagtaccttatcagaagggtgcagaagatggtcagcggttaagagcacttgactgttcttctg

SEQ ID NO: 2435 - DNA, 711 bp, Mus musculus
cagctctggctgctcccaagaaaaggcagctggctaggggcctggacacaagcacaacggggctggtggagccactgtgcagagctacttgaatattcactgggtcttcatcaactctttttgtaatacagaccactcaagggctgaagtgttggtaaccttcatttcggtgtccaatgcctcacagcagctgagccaccctgagatgcttgtggccacgtgatggccacagtcagagctttgaaagtcagtaccaaatgaacgtataattggacaccaaaaatcaagtgttactctcatgtttactcaccctgtcatctcatttcttcctgctgactatcgtgatccctacactaagctgaccagtcaggctacagctggctgcacgcagatgccagccagcaccatctcctggtttcagatagacctactccgtgggaagaacgtggcctagctgctttgtttctgtagcacttgatggctggattttttcctttgctaatcactaaccagaaaatctggctaggactcaactcactcccttcaatccccaggaccagacagagagttaattctggaaaattccgtacttgaatgtacctgccttactgtgtacccattcactgggggaggggggattagagatgttgggtctagatatccacttcattcaaagttattttggaaatcctgtaagttctacttcctgtc

SEQ ID NO: 2436 - DNA, 751 bp, Mus musculus
  misc_feature (637)..(637): n is a, c, g, or t
gcggggcggcgcggctcgagggtgactggaaaacaaaatcacatggttattcattcctcattgaacttagagtcggataattgtctaacaatttaacaccaacccactctttctgtgtcttgttttgattttggtttttttaaaagctgaactcacagcgatctccctgcgtcaacctccccaaaactgggattagagggaatgctaccattcccagaacaacaagccattttagctcaacgatttgagtgttcctagtcaggacaggcctctagagaacagagaaccttcatttatagcctgatctatttactagaaatcttgttagtgagataagtagtggctgcccagatcattaaggtaaactgctgagtgttaaaggaggtcgtgctcttggtggtgcgtaaagagcacatggaagacacagttgtacctgagctgagtatgagtcacctgagtcagtgctgttcaaacatggccagatctcagagtggcttaaaagtactgtggatgggtccgtatcctgatcctggtgtcagaactgggatatgttccgaccataaggatttaaaaatgccctggtttcagaatgctaccaaaggttgagagcagttgtgtcgaatttgacctagaagtntctcacctacaaagtaggaagttcttgccccactcattgcctcacggggatgcagagggcgcaagagaacactgggagtggtggcggtatggatgaacaatggtgcagaagtgt

SEQ ID NO: 2437 - DNA, 702 bp, Mus musculus
cacgcggggcggcgcggcttgaggatgcatgtccatcgctggaatcctccctgcctttgactaacattccagccttcctaggccctggcaacatccttgtttcagcaggaagtagttacagaagagagctcgtcgccccttttccccagctggctggaatgttagatcagaaggacattcactggcgtgggggacaaaatggctacctagactgcctattggcatactaggaaaggtacctgttgaactcagagacccagatctatcaacaggtagattcattagctgaaatagttctacagagtggcggggcatgggatctgttttatgcagcagatggaggtgttgtgtgactttaagagaaaactattgtttgtatacaaagtactcagggatcatcagaggtaatctgaggacctgcaatgaagcaaatggctgtttcccagtctcatgctccttctagttagcaactcgctcggccatctcagggtctttgaccctgtatttctgctgattactattggctctggctcatcaattaatgccttaactggataataatttctgcctggctaccattaagctggtggttattggattctgatgtaaacaggtacccatcacagagtcagggattcgactcaggatacaactcaaggggagaatgtgagagatagttatacttaaaattttaattatggt

SEQ ID NO: 2438 - DNA, 770 bp, Mus musculus
agaaaggagatggcatctccttgagacttgccagtctgtgaaatgggatggtcacagctgatactctgctgctgtaagaacctggatgatcatttgaaagtctgagttactggataagagcggcacacagaacattagcttattaactgcctccctctctgtctggattttgcggatagctacattgactccatgaaaagaagccacattcccagaacagaagcacaacccttctgaagttactggaatgagggtacaggtctgcctttgggccctttatataacagtagctatagtcccagccgtggctccctcccctccctgcaacacagctctgtaagctatgagaagagggagctcttccttcccattcaggcctttggctgtaaagtgtggggaagcaggctgaccttagagggccatattgctggggcttcccatatctgggttcttggaaaggcaggaacatccagacttgccatgggcacctgctgataatttgtgctgtcctggtatctggtggtgtgtgttcttgtgtaatctgtgggctacttgtgtcttgaaatgtagaatcatttcattcaggattgttactatttgttgggaagaaaacaatgaaatagaagcaacctagtcttacatcgtgtcttgttaccatttaagattgaccatttaatttttcaagtcatggttggtgcctaatcacttaagttattaatttattctgttttcaaaaaattgtaacatatttatcttgtgaagtctggggt

SEQ ID NO: 2439 - DNA, 650 bp, Mus musculus
cgcggtggcggcgcggctcgagctatttctccaatgtagtgttccagaggccaatacagccattcttggggggggggggggcaaacaaacaaacagataaaggtaatttctcatgcctcctcccctgttgaaatgcagcttttctatggagcttgttcccaaaatgtgtttggaaacgcccccagtgtggctcactcgtggtgggtacgtggcaagtgctttactcggaatttcttacagcctggtttagagctaaagagaaccagatcatgtggtggattatccaagggcaggaatgcacattttagaaacaaaacacctcaactgggtcacattttaaaattcaccagagcagttgggggttttctggggatggtgggaagtgtctgtcctttgaagctttctatgtcctgtggggatacgatgcatgcatgtatcgtatgtctgggcggggtatggggtgtaaggcatgtctgtctgccagcaccctccgttagcagatgcattggttagagccctggggagaccagcttctaaatatgaagtagcgaacacgtgtactgaaaaactaacgggaaatcaccctgtttcatgctttcaaatgaacacatcatctggctagtcaggggcatggctatgaggacctcggg

SEQ ID NO: 2440 - DNA, 567 bp, Mus musculus
cgattgcgtttagtctcttagcagagagaagaaatggatgctcagatccctaaggctgctcaatagtagccgcttgcctgcttggcctggtagtgtgaatgtcttcagtcatgcatcagggtacaaggtgcgagcagccctgaggttcggaccaaatctggaggaagaaagggaggtctctgagggtccttggtttcactttgctttgagcttaactggttctttggctttccaggaggcccaaggttgatttcagcccaccaggatctggggaagacccaactagggataagagcacaccaaaaggccaagtccgagttccatttctagaagaggcggcttccggcaaggctatgacattggccctggacattggtttcccaggagctgctttttctcaagaactccacagcacggggctgtctccagaaaacgctcttcaacgtttatttcttttaatcgtcgccggagccctaaggcggctaatgcaagaggccaaaaatgtttggaggaagaaaaacaaaggcaggaagtgggcgggtctgacggtgcgtgtgtgtctgtaaa

SEQ ID NO: 2441 - DNA, 679 bp, Mus musculus
ccttcacggagttacacacttcctcgtctgaggatacattgaaggtgggtttcataggatcactcatgtgagataccacacgacagccaggccaccattgggcatggcgttcactaggaccatgtgtatctttcatagtcctggaacccctggttatctgatgtagccccaagtgtgtgctgggtcctctgaatggcagggtagggcagggaagctgggtagaatcctctgcatgctgtaagagcccacttcatcttgtcatgatctcttgctttcctgccaaggctcagtgtccagtgcccataacatctgtacctagaacaactgtaagccagtgttgggagactgagacaacttattccaacttctagtccaggatactgtgtacacaagaccatttatagtccattgtagcaaatggatggaggcctttaagtccaagaccctggcaggctggaaccaaagaaagtatgcacaaaagcttggggtgaagaaggtgagacgagagggtgtggggagggtgtggacttccctggctgacatcaggctgtactgcctggggacctgagccggggacactccaagcagggcaaagaacaaatcagcagagccacggcattcctaggatcctccagggccaaagggcactgtcatggcttcttctcagtggccttcaata

SEQ ID NO: 2442 - DNA, 824 bp, Mus musculus
aatcatatagggcgaatggagctccacgcggggcggcgggctcgaggtccctctcttcaagtgttacagtctccttcacgaagagggacttttcagtccattgatagtcattttaccttcacaaaaaggtcgggttcctgttagaccgtgggaactgagcagtgggcatggttctgtgcagatgctgcaggagagagtggacaagcaggggagcagtgaccactaggaatcacgtggcacgggagccttctggtttgctgtcacgctatctgcagtaaactaacattaggtgatgtagcttggtacagcttagtggtgtgtacttgggttccttttttaaagtgaagatttctattttctcatcttttttttttctttttagtaataattactttgaattttggtgtatgtgctgtggtagttctagctctatcaaaaatggcttatggtatagtctgtccagaaggaaattttggggtactccagtggacaaaagatagcagtttcctaggtccaggctgaacagtaatggccacttggccaggagtttggtggaacacgcggctggctatttggagattaaatagcatcctcttcctccaactcccttttcagtaataacctttctgtagaaaatgcacataggaaagaacgggagatgatggtgaggcaggatccaacagtcatcctgctgtgctgaaataacaatgttcaatatttcgataaattcattggtccttttacttggctaaatatgtatatcttccataaacagtgggctcgtgttgtacacactgtttgtaactggtttttcacttattata

SEQ ID NO: 2443 - DNA, 790 bp, Mus musculus
gcggggcggcgggctcgagaaataacactacaaagtagtatcttctcggcttagttaactgctataaaccatggtatgagtatctgccctacatacgtaacattatgattatatattcctaactctgggagtaattcagttcagtggttatcctaatattttaatctgtgcctttcaaaaatcttgtatagacctagtactagagacgcatggctacaaaaaagggtcaaatgacaaagtagaacatgatacatgcattgcctgaaaaattggatgggagggaaagcttgctatctgaagtgatctcactagttacatctgtacatgaaagttttctttaatggaaaagaggcaatccattcagagggggaaaaatggcttaagtttttgaaagaatcccaaatattgataggatcagaattgacttgataatcaagctgggcatgacaacacaggggcttttaaaaaagatacaagctggagggcagcctgggctatattctatattgtgaggtgttctctctgtaattaagtaccagcagagccaaaagctggggaaggtggctgccattgtagatcagtggtagagcacttattatcagcacctaagaggtaataaattagttaactttgttactgagaaaatggtgtagattaatagtagcaaagaggcgttctcactaatgtctatagactattttaatggcaaatattttaatcacatttcaatggcattttaggtagtatgcacttgggtgtgaaagactagttctgtgtacatcaatgtgaa

SEQ ID NO: 2444 - DNA, 724 bp, Mus musculus
  misc_feature (582)..(582): n is a, c, g, or t
gcggggcggcgcggccgagcacaggaattctttttactggaaaaaagttcatttctgtttttttgtttttctgttttaattaacagtactaggtgactttgtggaagactatggttactatttaggtatgcttacttacgtacaatacactacattgcagtgtttctgaaacctagaacatacggattatatataacagctctatattgacgtatattacattatattcattttaactttgaatctgccatatgatcatcagttgattgaaatattatttcttcacatatatcacccatcaccacctgctgcagttaatctggtgcatttaatgctcctatttgccttttatattatcagcttcagtattgtctttataacattttagaactttttttttaaagctcagacatagcacacgtagtaaagtggaaactgcttaaacttttttaaaagttatttttctgtggctaataccaagaagttcatattgcacgtgatcgtgtttagctgtccctattaacatctgaagaacaatggaagtgcatatgaacatatctgtgatcttcctgtataggactngcatcatctgtatttgcttcagaagagtataaccaaggagctgcatgtccaccacatgatctgaccaactgtaataagctgcatttccaaagggctgctttggtgagacacaaagacaggaacatgccttccatcctgtcca

SEQ ID NO: 2445 - DNA, 849 bp, Mus musculus
  misc_feature (598)..(598): n is a, c, g, or t
ggaagaaagcatttttctctcacgatgaaaacagggaaaactgagtcctaaaaggacaaaagcctttcttctgcttaaggagtgggagcatgcctgtcaccttcctgggagtggagagtgtcacctggatgctgatgggacggactttgaggtccctctaaatggtgcttctccaactggctcctgaccctgtgtggtgcaggcggagtttctgtctctgctccctctgcacagatgggactgtgcaggcctgggttgacactgccagtgtatgacacaggctgagacctaactctcctgccaagaaatgcgtgggggctcagttcaccgactgtgcacttagtaatatgcctcacaggacaaaggggagcatgagtccctgttgtatggtctagcccgaatccactcctaggccatcctggagcctaggtagtccagaagacacagatgctccggggcctccccagcccctgctccccggggcagagcactcctcacagaatcctcaggcgtgtcccgcaaagcaaccagactggacaccccctccattcttcactggacttcctttctcttacagcataggacccctgaacacaancctccacattgtgtctgttgggtgcctttgtccctgtaagccctctggctggccgtcttccttgtttcttagcctgcgtctctcatccttaaaggactaactctgctgttgccttcagaggatcttagttccctctccttcccatcatttgtccttccatccaatggctgtttagagtttgcatttagcagatgttctcagtctggggttcgtcttccttgactgagaagacaaagtctcattcattccag

SEQ ID NO: 2446 - DNA, 711 bp, Mus musculus
gcggtggcggcgcggctcgagggtttgcagtcacatttctgttggaatatgtagaaggtaaaatgcttaaagttcctcttattttttgaaagcagatagatagatgcacccttaccaccttatctgcgtgccccttggaagcatctagggggcagccgacatgccgtctggcgaagacctctactttgtagactaaggcactgtgcggtgcttcgtttttatatcttcacaacacgtgtgatttcatcaaaaatatacacagagccacatgcccttcgtctctgcctggactcaaggccacccatagctaactagagccactgttttgtttatttgtctgtctgtcttactgcacgaagggacattaggcccacttccattaaagcaaattcttggtgatacaactgttggcactgctaattttttttctttttttttttaatccacattaggtgtttaagaaggacacataacaaactactcaaaactgggcctcttaacttgcagcccccaaaactcccctgagtgtgtggcacattcgctttatgaacattgcaacacaagactccagaaaccacgtctccctgacatcagcacagtttaatgaaaccaaaagctctctagtgggcccagtttaacctaacatctgatgtgtttacagccagttaaaaaaaaaaggtaatgggacctgtttcagcatgctggcagtgt

SEQ ID NO: 2447 - DNA, 793 bp, Mus musculus
accgcggggcggcgcggctcgagaaaaaagattacatgaaaacatcatagttagatttcacagcactttgtaagtttgatgccagttaccagagactaaaatgatgcaaccagctagtcttgaaaagatttcctctgagatctcgcaactttctcatttctccttatcctttactttcttttgatgttttggttggctcaagtaacttttcctctacagcccatgtgatgactgttataaaaaaaaactgcagttaaaatatagtactttatgtgaaacaattgttcaactctttaggcagcttttgatcgaatatgtgagagtaataacactactctgtctacctgcaataccttcctgtatagaatgtatctttgtaagctaactctttcaaccaggtgtctattcttcacaaccaatgtcagtacaactgtgtaactcatcagtataggagaaagaaaaaaaaaccacactgcaattatcaaggatagaaatgtgatttctgtagagaactttactgactttatacatataaatgtgagtctgaaaacatgtctgcacaatgacaagtatggtacacagatttttattgaaatgttgagcaaaactattttcattctaaattataagtaccaatttgcacattataatatagaaattcatttggtatatatttaacatatgtttcaaggctgttttacatctactaacttctttatgaaggtttgtaaatctttgcaaaagcaattagacatgtgttaaaatcaataacagtcttgtttgacttaacaat

SEQ ID NO: 2448 - DNA, 757 bp, Mus musculus
tattctagtaggaatatggaagactttgttactgagaatgatttgaattgtgcaaacctgacccaagaggtttcagtgaagaatttcaacatgtggactagagactggtatggttatattttggtgaagaatgtgactaatttttacccttgtgtgaagagtctgcatgagtctaagcttaattacaaaagaagtctcagaaatgccaatcatagactttgttctctggttaagtctaatgaagagcatatttaaaaagtatagcaagctgaaaaaggaaaaatataaaatatatggtttgaattttaaagggacaccaggaagtgaaatgaagctgaaccctatgttcaatgatattgaattaagggagtagtgactttggagcaagatcccacccaataaatttaggtccaggcatggtagtacaagcctttaatcacagggagcaaagacaagcaaatcaaggccagcctagaacagagtaagttctaggtggataaaaccttaaatacagtttggtggaccacacctttaatcccagtgcttaggagacaggcatgtagatctctgagttcaaaggcagtctacagagcaagttccaggacagtcaagctgaggcagtgaaggagttggaaaacagaaagctgatagtaatgtaatagaacaagggggccatgtttcagctccttcaagcagcagaactcggcagcgtcagccatgtgactctgactttagagtgaaaaatagaaaggactac

SEQ ID NO: 2449 - DNA, 764 bp, Mus musculus
cgcggtggcggcgcggctcgagggcataatatacaatactcagtttcatgtgatgcaggaggttgaatccgagcttcatgcaggctcagcatgcatcctgccaactaagctaagcccctttcatatagttgtgctttgtgatgctaggcaagctcaggctattctaatttttattaggaaccctaggaatctctcctttgctggccttggctcttcctcaagagaactgaaggggcagagaggtccctgtacccaggagtgagtcacatttcctaggtaactcttacgggtcattaaaatagttcactactgcctgaggtacgatggaaacatctgcagggacttggcccagatgctgtggctggaacagcagtctcccaggactcactctcaaatcctagcacatgcctccagaggtaatcttcagctcagagtccaaggtgaaagagcatttgggagtgtcaggttaggcacagctctgtgtacccctggtggaaaaaccctgcccagttgagagcctctgtctcttgaaattttggttttgtggtgcaggggctagagaaatgattcataggttaagagcacttgctgctcttgcagaggacctgggttcagttcccagaagccacatgacagctcataaccgtccataacttcagtttaagatgtcctctgtgggcaccaagcacgtacacatgcacttatatacatgcaggcaaaatattcaaacacacaaaaaaaagttgtatcaaaagagaggatgt

SEQ ID NO: 2450 - DNA, 480 bp, Mus musculus
agcgaggcggccgaacgcaagtgtctggcttcccggcgaggcccaagccgtccgtcccgccgcccatgagctcggcgccccgcgagcagcgccgtcgttaggccgtccccgtcactcactctcggcctcccctacctcccccccggggcagtcattcccctccccatccccgtctggccggggactggacgtcgcgtcggagcgccttccccagtccgcgtcgcggtgcgaccctggaagcgggcgccgcgccaatgagaggaggagaccccggccgcggggcccagcagccactgagccagcaggcgggatcgaggccggcaacatggcgagcgcttcgtaccacatctccaacttgctggagaaaatgacatccagcgacaaggacttcaggttcatggcgaccaacgacctgatgacagagctgcagaaagactctatcaagctggacgatgacagcgagaggaaagttgtgaagat

SEQ ID NO: 2451 - DNA, 848 bp, Mus musculus
gcggggcggcgcggctcgagctcctgtcttacatatgtagtcattctgaaacatttctttcaactctaaaattttcatgatctcttttcttttaagccatctcaggccaaaggaaatcattatgtcatcttctatgttcctgtgtgttttatgtttgggctgtcttgataatgccattccgtaaaatcttttgagaaaaagaaaaagtgtgtattcaaattggctctctcttcttctgtcatttttacctaagaattgttttttcaatagcccaatataaaaacaacacccccacccccccaaaccttatacgcaatgtgtgcagtgcagatacctgaatctcaacctagtcaccactacacatggtagtcctcatgacttagtactacagtcatttttaaaactaaagtaaaattctaattcttgagattgccaaaatattttgattttattctctttcattaccacatactggatttaggaaaccaacaataggtacaatccaaacaagataaattccgagtcatccaaatgctacctattttgtcagaacagtgttctctttgaataatgaccaagataccaggagaagcagaatgtgtggagactgctagctgttttcacctaaggaccccaggatagaaccttcatgagctaatggtaatgtcagcaggtgctgaagattagaaataattacttagtttttttatattttaaatctttgtttaatggttgaaatatctatgaaaaaactacaatcttttctattgacttaaaaatcctcttcaccgaggagtgggattggtctcaaagggtcctcacgttcttcatgatggaggtgttgggtg

SEQ ID NO: 2452 - DNA, 622 bp, Mus musculus
  misc_feature (616)..(616): n is a, c, g, or t
caccgcggtggcggcgcggctcgaggttttgtttcatgtaactaagcccttcttcagaggtctgtcagaaaggcgctgagagtgtgatgtctcaggcccaggtgtggtcagaggcctggtctgtgctcttgccacccactccatataacacagagtgttcagagtctcaaaggctgagaagccgcccaacacgcagggagagctgggaaggacacgggcccttcattcactttcactcccttcctgttggctgagatgccagatctgcctgcgttccttcctccacgtccttcccatggctgtaagcaccagaccacgatacttaagggagctgtgctggtgaaccttgccttgctgcctgccttccctctcccattctgtagctcttgactccttccttgattcacctcttccgtctcctcagggacccgccctccagcaccatcatcctgagagatataactgtactttgtacagcctgaaccgccaaaaagacacacacatgcaattcttcctctggcttctgagaggctccttaaaggtgctaacgtgctcagctcactctccccggcgtgtcccatcctcagaacacatttccattatctattgtacccgncaaaaa

SEQ ID NO: 2453 - DNA, 673 bp, Mus musculus
gcgcggctcgaggtagaactaaaggtgacctcctccctgtttccaccctcccattgcagcccagtctgccctatcacatctgtgacagcagtggggacctctcatgtgtaagcacacgctctctcactttttctgctccaggtgggtaggaaggtctcccagagcaggcctggccctctctctgcacaggttccttgtctttgggctcctggccctcttcagctctcggggaatattgaatgcgtcctttgcagtgtctccagaggaacagttggctatccactcaggaaagcacaggcctgaggctgtttaccttgcagggtcaggaagcattttcctgtggaagggcctcctgctgattttctcctggtcctttcccccagcaagagtctgtgcagtgccagtcggggggtccttgtaattccagcccaggcagaagtggaagggaagcagtgaccagggtagatagcaggtgtccgggtgtccccacagtcctgaggtcacttgcactttctcatttcttaaaggaagtccagtgttcttgccaggaatccttagccttaggtttacaaagcttgctgttgaatgttcgtccggatgagtgtaagaaggcaggaactgcttggttccagtcctgcctgcaaggtcaagaaggtttaagactacgtctaaa

SEQ ID NO: 2454 - DNA, 701 bp, Mus musculus
taaaatatgtgtgagtgttgtgtatgtgtatgaaatcactcttaactctcttaacttttttaaaactcgtggcataccaatgttcagatttgccaagctttctctaagacatgtaggatgaaatgttttgtgtgttaatgcatgtatttataaagattgtttactgctgagaatcactaactcttgttttcatccccaaagtgtttgtttcttccacatgctggaaggcttggcttgagtatacgctttctggctttcctttcacaaaggcacgttcaaaattgttcagaaagaagaatggtctctgacagtgaggtgtgatgccagagctttctgaagtttgagcagtgtgtgcagctctgcatgtgtgtcctgacagagtcagatatgtgagccattaaaagaacattgtaattcagagtgtttatttaagtaacttacatgtctgaaatttatttatgtagattccatcattgttatcatttgtagtgcaaatacatgaactgtcttcatttagtcccaacaattatttatttttagaaagtaaatttaaagccaagctgcattcaattttaaaatagtgttctaatcataagatgtgatcatcgtaaggtctcttttaactttctggaaagtaaatggtcaaaaggaatcacataaagattgttttacatttttaacctgtatgtacttagaggggt

SEQ ID NO: 2455 - DNA, 762 bp, Mus musculus
accacccctcatcctgccactgcccaaccttctcctgataaccatggcatgcaccgtctcctctcccctgcccctcttccctgaccccagctggctagcactgcagagtttggctgctggcagtgtggctggaggggaggggagaccacatctaaggtgggggccatggccgtgaatgtggatgacacttgttctcctgacccgtggtgttgcagtctgttgtcaccagccttgttttagtgtgtatatatgtcgcccctgtgatgcatatatacacaggtattaaatatatcgctctatataatattatatatgtgtgtggtatccaaggaatctcttctattgagggctaaagataaagaatttggacacaaaaaaaatgcagacatccttgtgaattttgagtgcttatggggtcatctggttatttagggcattgagactggagccgtggctcagatgattggggcagaaaaggcagggtggccacacctgctctgactgctagcttcccacagatccatgtctagaataccagtgtgctcaggaaaaggaagtcatttcgtgtttgtttcccaccaaagaagaatgaatccaggtttttctactgttcgtctgtccagggtccctgagatctgggctccttacattctagactatgtcccccccatggaagagaagagaagaatgatagggatgacctggggtggggggacagaaaacatcttaaatgatgactgtagttaatcagatgtgacccct

SEQ ID NO: 2456 - DNA, 717 bp, Mus musculus
gcggtggcggcgcggctcgaggtcagtgtggagctgagtgaggaagcatacactcaaacaggatccttccaagccatgtgcagccttggaacaatggacttgctttcccatggtcagcttttaccttgtgggagtaattcttttctggggggttgggggtggattatctacattgtagatggacaagccagaacatgaaaaacaattctggaacattttactgtattttcacacccaaaacaaaatgctgggtacctttatcctaagaggcataatttgagcagggagggtttccatcaagtttaccttggagggtctcgggaggctgtttgtatgtgtgtgtcttgtcagcatctgttattttgagttcctgaaaattttgagggaaaagaaaacctaatgtgaagtatttggtaggtaaactgtttttgagtgtttttactgttttacaagcagataccatttgaacaaaaaaatgtcattaacctgctgtcttaaggtagtcctacacaaatctggagagcggattggcaataggaaatgtttattttagtactgcatttcagttaagtggttaacagtgttaagaggtcttgggaaagtggagaaggcttttgtagtcttcgaaatcgaaactgcctagtgcttcacgactggaaaatgggactgtaatcacactattttgatacagtgctgcatatatacatatgtgtatgt

SEQ ID NO: 2457 - DNA, 345 bp, Mus musculus
  misc_feature (155)..(155): n is a, c, g, or t
tcacgcggtggcggcgcggtcgagtactaagatgagtgactcttgaagctacaagaagagagaagagagtgagcagatgggctggctgggaggaaatgtgtgcttagctagtttcttttcttgagtcatccattctcataggtagcttctaccangcaagccgttgttgcagctggctactaggctagtaggtggttagagaaagcagcacctgcttttactttgcagttctccacagtccttaacgtgttttttaccatccatagtaagtctgactggtctccactaggtaaactgctgtgaatatgtgggtctgttaaagtccccctgttgcttactgtgttc

SEQ ID NO: 2458 - DNA, 644 bp, Mus musculus
ctacgcggtggcggcgcggtcgagcttttcttgggaggacatgactgttctgggctatggcctcctgaatgtggccactctgaactgtagcttccaaatttcagcatctctgatgtcccatgggcctcccagacacagcaatagctaggcttcaggagggaagacagtgaggcccctggctagaatgggggctttggtggctttggctggcagtacattctctctcgctgctgctgtgatgccttacctaatgctgggatgaccatctgggtcccagggctctgaggggacctgccggccatctgcctgcttggcattgcctgcttccgagaagcagcagggtggcttgggcaaagcagccccatccgcttcctcccccactacctaccaccattctctggctgccatgaggatgctcatcttaggttcctgccccgattttccatgcatatacacaaagcccaggaattaggaagcccagctgtcctacctgtcattgcaaaggtaggaaagtcatgtcactctcctggattcaggctttcagttcatacagtgcacaatgcaggttcctgtgtccagatgtcgtgtccagtcaatgctgcctgaagacctagagtctgacttgaggggagggaatattatgg

SEQ ID NO: 2459 - DNA, 661 bp, Mus musculus
acgcggtggcggcgcggctcgagtatttttttttttttttttattcatttaaaagggccatttatttatgcatttatttctacatacacagatagaggcagcccagaagctagtctctctcagccgctgattcacacagcctcctaaaaagaggagggcgtggaaagtcagaagcaggtgtctccaggcaccggggacagaaggcaaaggccagggggagggcacaatctagtggcgaccagaggccctcagccagctgccacatcctgatgaaccagactttggcagatgccagtgacggtgacagcggccgttccccacccacgtgaaagtgtgtgtggctcacccttccgggactcccccaatttgcctggggtggtttcaacttatattttacaagtcagccttttcttcacttcagaatgattctacacagccccgttgtttccttccaagaggcaacagagcttccaaaatacagactatagagtcagccagcccggccctcgggttacgggggcacagtggtgccaacctgggggtaggcctcagttctctcatctgcaaaagggggtgtgatgacgcagtctgtgatggcactcacagagaagacgtgactgagttgacactttctggggtgggcaagatgctatccctgtgg

SEQ ID NO: 2460 - DNA, 742 bp, Mus musculus
acgcggggcggcgggttgagattgcttacttcaaatattgtaccttgttttagcctacctcacagggctgttgtgaggagtgtagtgaaacggactctcatgtgaactgggtggtttccactaagaatggttgtgtttggatacttgtaaatgctgtttagttagaaaaagcatgttaagttggtataagcagtgattttaaatgatttttaaaaataagacgtccttcaaaatgtcttttagtatcaattaagtttgtgcatgatgtttttatatttctcatcaactacacaacttttccaagttataaagtctactgcagcattcatgtgtagcggggaagcctacgtaagcaaacgactacagctccttccccccaggacttgcacttgcactagagcagccggtgcccatgcagagtgaacgtggctgaattaacttttccaacaaccaagtgggtcagcaatttgatgcccttgataaatatcaactttattgaattgtaccttttattaaaaaggaaatacttcaaaaccttgttcattacctagaccagttattatctgtctggacatagttgtgttcctctaaattggatgtactaaatagtttacaagttatcctactccacagatttggtatgtcgttatctggacatgattttgctatgcagttgtgataataaaaattccagctcctcaggtttaacctctaagttgtggatggagactatttaacagta

SEQ ID NO: 2461 - DNA, 751 bp, Mus musculus
ttatacagaactcccaaacatttggacctatctgttccctatgatgtaaaaacagaacaggttaggatttactttagagaaccagttgaaatgtcattagtcaccaaataccttgccttaagatgtttcaagaaagtgtattttcttacgatttaaattctgattttatttgcattatataagccgctgcctatttagtgcatgggtgcaacatgattgttggttggatgacttaaggctcctgcattatggagatggcttattttgataacttctcagaaaaagtctctggtttggaatctttgagatgagacatggtcttcctctataacaaggaaaagggctgactgtaattaattctcctgtctccaccggtgcctggatccgtgattcttaacttgttctcaatcttatataagcaacaagtacttaaaacttagatgtaatttgccagaagattctgaggatttttttgctgagaaaaatctagaagctcttagtaaccaaggacccttgacttcacttctctagactcagcagtttcccctgcaggagcgtttcccaggaggcagtagaacccactcaccacattttcacaggagaagaggcagccaagcccacactagaagaccgggagttgatcgggtttaattccatgcctgtggttgaggtaggcaggttgaaacatctgtactgaccagaggcagagtgcattcccgttttccctcagtacttgatgttgagacaagtg

SEQ ID NO: 2462 - DNA, 558 bp, Mus musculus
caccgcggtggcggcgcggctcgagcggctcgagctttaacctctgtcccgagtctcttctgtctcagcagatgtccacttggctgacagacgccctccaggaatcaactgtggactaccaactgctccaaaaatgactctgcactctggactggaggaaagctgatgtgaaccagcccagccgatgtgcttgctccctgtctcttcagctgggtcatctaactggatgcctctgatgcatgtcccatcgctggaatccctccctgcctttgactaacattccagccttcctaggccctggcaacatccttgtttcagcaggaagtagttacagaagagagctcgtcgccccttttccccagctggctggaatgttagatcagaaggacattcactggcgtgggggacaaaatggctacctagactgcctattggcatactaggaaaggtacctgttgaactcagagacccagatctatcaacaggtagattcattagctgaaatagttctacagagtggcggggcatgggatctgttttatgcagcagatggaggtg

SEQ ID NO: 2463 - DNA, 282 bp, Mus musculus
gtttaggagagggaaaaattgttggaattttttctacatttttttgtgaagaatctttttcggaaaggaaggatacatatttttgtgtgtaatattttctatttttgaatgcattttattggtaccaagcactgtttttttggtgcacagcaccattcatttcacaaaacacagcacacacacaacagcaacacaaacactcaatcgcacaacagtttgccccttcaaggcatcatgctgccagttttgcagcattcaaacacacatcacatcaactgcatt

SEQ ID NO: 2464 - DNA, 530 bp, Mus musculus
taagaatctcctaagagctcatgttcatcaaccatggtttctcagaataattttatttaaattaaatacaacttcacaggaagtcttatttgtcaaaagcagtacatagagcatgtgcttgtggctctggcaagattttaaagctcttcaaacactacaaattgggaagcttggtgtggacaatcgccattgatgagagaattcaagttgaaatgtgcttcacccacacagctctggagtatttaattattgtttctactgcgagtattgaggtcttcactgaggatatttttatttatacggtaaataagtagttaaaatttgttatagtttaaataccagttaactcgacaagttctttagatctagctgtgaattcaagttgtgccatataggatgtaagataaaagtattgctttgcctccacaatagaacctcagttataaggagaaaagggaatctggcacatttttccatgccgaagctgtatcctgaaggggcaaaatgaagatctttaatgagcatgccct

SEQ ID NO: 2465 - DNA, 410 bp, Mus musculus
cacgcggtggcggcgcggtcgagcacgagggcgcggcgtggggcgctggtagctctccgcccctccgcctgcacccctcccgccctagggctctttcctggactgcggctgcagccttctcttcccggagggctcagagttcgtccccttttcgcgattgggaacgtggacacgccggagcctggatgcagaagggcgcgcgggaacagggagctggtgcgcgagccgcagcccagcgtccaggccgccccactctctgctgatccaaaggactagggaaaccctgcgcgccgacggtggcctggacgttggcgcgggccctggcgctaaaaaacggatcccatttccagaaaggcgggccgggtatcccgctcctgcctcctggagaattagctcggcggaggtcgacc

SEQ ID NO: 2466 - DNA, 434 bp, Mus musculus
  misc_feature (395)..(395): n is a, c, g, or t
gcgggtcgaggcggtgagagacagccgtctccctatgtatctggggctagtcttgaactcatgatcctcctgcctcagcatctagattctaggattgcaggcgtgcatccccacacccagctacatattttcatcaacatgcagaggtgggttgcttctgataccaaacttcttagactccatgggattgtgtgaagatttcccacaagttctcttcctagaagcagaatagcagccaacaggttattattcttggtcacaacgagcaagagttgttaggactaagccagaggccatcttccttgcttgaaggattctcttcagggtcatcttgctggtggttgcatgcctagcacaggggaagagatctgcccctggatgcacaacgttgccanggaaagtagacaagaaaatgacaggcacaacgaattccc

SEQ ID NO: 2467 - DNA, 532 bp, Mus musculus
atagggcgaatggagctcaccgcggtggcggcgcggtcgaggcggtcgagcagcagaaagcttgacttggtatttagccaacgatggtgcacagccctgtgaggtcacagatccatttgggctctgttaatgtgtttgggttttggttttttgagacagggtctcaccaggtacctccgctgtcttggaactttctctgcagaccaggtaggcctcggactcagcggcgatgcatctgcctctgtctctcaagggtttggttagggtattttggtttttgaagtagactctcatcctgtagttcaagctggcttcaaactcacagcagtcctcctgcctcagccttccaaatgctgagattacaggtataatcccatcatgcctcagacttggttgtttacattttgaagggtaaatggcgcaggcttgtgatgtacactcaggagggtgaggcaggtccaccatgagttaaaggccagtctgggccacaaagtgagattctacctcagaagtagtaaccttgccagagatg

SEQ ID NO: 2468 - DNA, 319 bp, Mus musculus
actcctgattcctcacttcacacagaggctcctttaaagatttaagtgttctgtgcaaacccaataaaattacaattaggggatctaatttatcacatagctagtaagttagcagcatgtgtagtagtgaaatcaatgactggcttgcatgatggcttctaaaagcatctgttcccaaagtttcatgtattatatgtctattatcaggtgaggacagccactcacatttcataaacatggtcaactgaacattaacttctcccagccagtacctttgccctcataaatgttaaaagcagtcttggggggaggggaaggg

SEQ ID NO: 2469 - DNA, 579 bp, Mus musculus
  misc_feature (382)..(382): n is a, c, g, or t
tgagctcacgcggggcggcgcggctcgagtaactggatagttagtgtgaaacagtttccgcttgagatctccatttctcactctgctgagccagaactcgcacagctgtttcactgattttctgtgcttattactcacataacaatggtaattaatacctttcagttgcattttattatatttcaggagcaaagttactttgcagtaacacatatgcagaattctcccaggaaagtattcaatccaccattgtgaatggaaatcttatacaccacattcctgtcgcagagcatttgtattatgggatgtttgatttacaaagtagtgtgatatgctccagcaaacaggttaaaaatactttgaggtcaaattgtcttggttntgtttttttaaagtgttactattaaaactcttgtgagggattgttgcaaaatactccctcaggaaagaaagcagtgtgccttttttgccttttttttttaatgggattaaagtttctgaagtgataaaaatgaaaatcacactaccatttgaagtccattctccaggttttcagtgtcatttctgtgcagtcagttt

SEQ ID NO: 2470 - DNA, 760 bp, Mus musculus
  misc_feature (681)..(681): n is a, c, g, or t
cgagccgcctcgagccgctcgagccgctcgagccgctcgagccgccaagctcagatctctagtggattcaaaatgtataccagcagaattagtctgctggacaaaactggttcttcggatagctaaaacactagcaggttctttaccgcattctgttaatgatctcatttgtttaaatgagagctttttaaacttctgacttaggcactatgtcatatcctagcacagagtagatacgtgggctaggatgatgtacagatatcgggagagaatttgttccattaacacacacacacacacacaatgtattgttacagagaatcaaaagcatgagggagttgacattatacttacaaagtggaacgaagaattatctggttatttttctcattgctggtatccaaaattatgactgtatcagatttataccagatacagtaggacatctgctaaccttaaagacagatggggatattttctccctgtatcttcagacttctgaaatgggagactttcaaaggaaaagtggaaagttcaacactttagcttccttctaaatccataatagctgctagcactcgcagcatttttctctcccgtgaagtataatagtctcacaaagtaacgtaatgcatcagagctcagaagaaaggctgtcccttcacgttctccatggcacangcttgtgtctacctgctggtcacacgcattggatttaaagatgcttcattgaatcaggcatggcggctgtgcttgtgat

SEQ ID NO: 2471 - DNA, 728 bp, Mus musculus
caccgcggtggcggcgcggctcgagctaatctccattaactacccccaagacaaaacataaccaggaaattattctgttgccctctgccaggtagagaaagcagaaggaatacttgggtctgtaactgttttgaaagcaatataccttactaaaggtgacctgaaaacggaaatgctggttaccaaaaaccacgtccttttcaaggaaactttcacaaagtgcctagtttacatgcgtgcccatttttgaattgagatggtaaaatcctagcacccaggcagcagaggcaggtggatctctgtgagttcaaggccagtcttttctacagagttctgggaccgccagggctacgcagaaaaacccccgtttcaaacaagcaaaaacagtcccagttttctcagactctgcctgtactaaaatggtattaacatcagatctgctttccaatgtatgagctgaagctgggttgagacgtatctgtttctaggaaaaatatacaaagccatatagcacacttattttcctattgcaacaggagtttcattctcagtctcggagggggcatctagtgaaggtttgtgagctcaattctgccttcctggtgacctcaggtacgggagagaatgatgctggattaggtgaagagcatcgggttcttggtgcctacaacagattcttcaccgagtttgttctagacttgcatcactaataagatgctgtactgtgt

SEQ ID NO: 2472 - DNA, 375 bp, Mus musculus
atggagctcacgcggtggcggcgcggctcgagctagtactagatcgcgactggagttttttttttttttttttggaggattaatattaattttggttatccccagtgtatgtgtccattacaaggcatggggagagcaatacataaaggtcatttgtgcggtcaaaggacaactttgtaaactccttcattttcttgttgccaccttgtccagaggtccagagatcccacacaggttggctccgtcagggttccctcacctagcagtaagcaacacatcccttgcgcccctgtgagacagtatagacctatacaaacagaatcaaccgggttaattacccctttaaccaccttcccgtgtactatcatctcaggg

SEQ ID NO: 2473 - DNA, 760 bp, Mus musculus
acgcggtggcggcgggtcgagggagggcgagcgggctcgggggtggggggcgtagccgggagctgagagttgcggggccgcggctcttccgaagcatgctagggatccggagcgggagcgggagcggcgccgcgtccacccgcggcgcacgcctccccacccatccccgcgcgggccaaggaaaacagccgtctccttgggggcgcgggccggggcgcagggcaggctgccacggccggcggagtcacccgggccgggcggcgccgccacagacgccgcgagcccacgcccgcctggtccgagctggcttttgttgttgtggggagttgtagggcgtctgcgagtctaacccggtgcggagaaaacttcgcttaagagtaggtgtccgggtgctgcagaatgagcccactgcctcggcgttgcccaggaaatgcagcacttgaatcgggattttttctccccccttctcgaaggcttcatagcagccaggcgtgtttgacatagccaccggggcagttctgaggtctcgttctctttctctaaccgaccttcaggcgttttccttcttttttaattgttgcatgagaggattcaccttagtagactttacttcttcgtatgtgggagagggggagcttggtccgggcttgtggcaaggtaaagatcggccgcctgggaaagttcatgtccttcattaacttctccctgttcccaggaagggctctccgaaagctgatttttctctggcctccgagtaaca

SEQ ID NO: 2474 - DNA, 730 bp, Mus musculus
ctggagccagagggaactccgaaggtgaccgcaaagccagcgcctggagcagcaggtccccagtcggtgggtcgggctatcctgctaaaacagcaaaggtccagcctctcagtagagagaggatcagggacgctgaggagcgtggtgcacaccgctgctgcgtagagccacatgaagcctgtggaggaaccaggatcagagagcggcaagcgagctgcgcctgaggagggcgccttctcccgaagccgctgacacccgggggaacctttttccttgttcctggactaaaacgcttctcccgaatatccagaatggtgttcccgaagttgatctggatgggtttcttttgccacctgtgtcgaggctactttgatggccccctgtacccagaaatgtctaatgggactttgcatcattacttcgtgcctgatggagactatgaggagaatgatgaccccgagaaatgccagctgctcttcagggtgagtgatcgcaggcgctgctcccagggggaagggggccaagccagtagcttgctgagcctcactcttcgagaggagttcacagtactgggccgccaggtggaggatgctggacgcgtcctggagggcatcagcaagagcatctcctacgacctggatggggaagagagctatggcaagtacctgaggcgggagtcccaccagatcggggatgcctactccaactctgacaagtccctcactgagct

SEQ ID NO: 2475 - DNA, 726 bp, Mus musculus
gcggggcggcgcggctcgaggtttgctggagacattgttggcgttgagtcttttccaggctgctgattctgctagtcacgatggcaagcctggaataggggaccttcggccatttagaaggggcatgaacaaaatactggccaaccagctggactcagacacacaaaggttttaattttcctttcagccttactagaagatctaacctaagagtaagctgaccacagggatgttttttagaatactttttatgcagatgaaactattttttccagcatgtagattcttccagctttttcaaggagtactttcccggaatttggcataccacagcgtagacagctgatatttctgatatttcatccagctgcttggctttttgggtgtggatctttacatatatgagaatgagtctggctgggctggtatttcgtttgatcttcctggaaacgagcaatgattaaagctcccttaactgctttttgttttgttttgttttattgtatctggcctgatgaatacatttctctacagaactgatttcattttgctcaaggggaaaatgcacttttgtttggcaattcaaaatcctagcacttgatttgctggatttcggaaaactccttttttggccctgctgtgtgcttatccatagcaattccattaagtaagaaggaaaccagaagagagaggaaacttgtgctggcgcgtctcacttatgaaaca

SEQ ID NO: 2476 - DNA, 737 bp, Mus musculus
gcggtggcggcgccgctcgagtacgcgtccgggcggtcaccggggtcttgggggggggccgaggggtaagaaagtcggctcggcgggcgggaggagctgtggtttggagggcgtcccggccccgcggccgtggcggtgtcttgcgcggtcttggagagggctgcgtgcgaggggaaaaggttgccccgcgagggcaaagggaaagaggctagcagtggtcattgtcccgatggtgtggtggtctgttggccgaggtgcgtctggggggctcgtccggccctgtcgtccgtcgggaaggcgcgtgttggggcctgccggagtgccgaggtgggtaccctggcggtgggattaaccccgcgcgcgtgtcccggtgtggcggtgggggctccggtcgatgtctacctccctctccccgaggtctcaggccttctccgcgcgggctctcggccctcccctcgttcctccctctcgcggggttcaagtcgctcgtcgacctcccctcctccgtccttccatctctcgcgcaatggcgccgcccgagttcacggtgggttcgtcctccgcctccgcttctcgccgggggctggccgctgtccggtctctcctgcccgaccccgttggcgtggtcttctctcgccggcttcgcggactcctggcttcgcccggagggtcagggggcttcccggttccccgacgttgcgcctcgctgctgtgtgcttgggggggggcccgctgcg

SEQ ID NO: 2477 - DNA, 619 bp, Mus musculus
cgcggggcggcgcggctcgaggtttatttttcataatgtttaaaattaagctttatatattttcacactaaagtgttcatggcttgtcgtacatagacccatacagcctgtatgacagggccacgggtgaaaagtgtgtagaggaagtcgcaaggacagtccccgggggtgtttcttacctgtccttatagtcactgggtaagcgaacgtcagagctgaagagagcataccatgaggctagctatgttgagctgctttcttatgaatggaccctgggatctaaggaatataatagtcaaaaaagattagggctgtggccaaacctttgtggtaggccatatgccaagaaattaaaaataaatgaagtgaattaaaaggaggattcgacagcaccaaagctgagcttgctgttgtctaagctagaagctttttgtctgactcctcccagggtcccagggtccctcccagggtcaacttgaagcttgcagtgaccacggggttaaggggtgccatagcgagcaatactaacagggatgaggaacctccagcacacagcagcgggccacctgcaacagtcccagctggttctcctctggaaagagttacagtggcaggtgat

SEQ ID NO: 2478 - DNA, 416 bp, Mus musculus
gcccacccaggaagtgacggccttccacgaggagacgcgcttgacgttctcgcccctttcagaggagctgatccgcgagtacacggcagcgggacaaggccggggcctacgccatccaggcgcgtggcgcgatgctggtgcagggcgtggccggcgacgtcctcaacgccgtgggcttcccgctcaaccgcttctgccgcgagctcgcgcgggtcccgcccacacggacaggaagtgaggaagtgacatcacaggcgacagggcttgacagcaaggacgcgaagtgaagtcatgggcgacgggaagtgcttccggaaacaggaagtgacgtcatcgaacccccatagacacctttgacctctgacattggccccagagaagtgggcggggagaataaatgcctttggcctcaaaaa

SEQ ID NO: 2479 - DNA, 662 bp, Mus musculus
gcggctcgagggactgacctaggacagtgcaacctgggatgtgaagtacctttctgtacagcctgcctctcagctgacaaggacttctccgttttcctggcttctcatcattcgcacaataagtaacatttctttggcatgtactcagctgaagagaagccacggaatgagtcagttccatttaataatttatacctatgaattttaattgaagtacaaatgctgaattatttcacagaagacagccacagggaacaactccctcaatgacgtcaaggaaggagtaatggggccacctcagaagctcctcatgccaaagcattaagtattcggaggaagctgacattgttgtagctggaaagtggggaaaaggagaccagtcccacacactgaactcttagagggaaagaggagccatttggcaaaaattccaaactacaagaccctgggtttcttccacctatcgccaagaagcctgtggaatgacgttaccctctcacatggtcccagcagcccaccctcaaatcttctgctcccggacaatttgatgttttcaattggagatgcagggtctggttagtttttacctggttaatagcttcggatgcatggagacaagtcgtgtcaaccacctttgagctcactgctgggctggaacagtg

SEQ ID NO: 2480 - DNA, 737 bp, Mus musculus
gcggggcggcgcggctcggagatgacatctgaggtgtgatgtgtgctactataaataacaggaatctcacagaacccctaaagaaagttctattcctattcactattcttttagtaattaggaaaacaaggaagtgaggtgacttgccattccccaggtccctcatacactatataccctgagctgcagtgcctctagaacacaggagtttaactactctgtgttgcctaaagcatatgactgttgaagctctaagctctactggtaacatgcccagagaacttcaccttcctaagggaccgtgtacaaatatacaatgagtcaaagtacacccatagcctttggagtcagggcacctttggtatgctcaacactgtggcacactagcttccccactgatgaataggaaggaaattcagttgcaggctggtcttatttctctcttgcttctttgcagagaaatattggaaaacttgccttgtacttttggcctcagagataccatcacttttagaacaaaacacagcagaaaacttagctggctttcctctggccagcatagggatttcagtaaaagtgcatccgaaggaagcttgttcactattgccagagaagaggatgctatgggacagtgtggcagtgtggacagcatccctttactggcgttctttttccactcttctgttcaatcctatgaagaaaagagtgtcttcttttgaacagaatgatagtgagac

SEQ ID NO: 2481 - DNA, 735 bp, Mus musculus
accgcggggcggcgggtcgagctcccccttttgagacaggtctctctacatagtcctggctggctgggaagcgttaggtaggccttgaactctcggagatcctcctggcctctgcttctggagtgctaggattaaaggcgtgtgcaaccatgcccagtggaaatgggttttgaaacaaaggttatacatagcattttaggagtataacataagtgcgccctcttccccccacacaagcatatgttaaacagaaagaccagctacccagggtgaggcaaggaaaggagaaaaaggcaaaacaaagacgcagggaaatcatttctcaacatgcacgagctccgacctcaaaggtgccaagaaacctaagatgcccgtgctcccgtcgggaggactgcatatctgacagtatacaacatgatgctttccatgtcttaattttaaaactgtaaaatataaaatgagaatctgaagtcccaaggaattgaagagcctgaattcaaatggggtgggggggtctcggtgttaggggaactgcactgtacctttccctccctttctccccacattcccattcccccacccaaggtgaaaactgtgacacctcagtccatacaacaatccactgaaagctgctacacggatcccttcgtccatccaaggagggaccagactttccgtaacaacattctgttacaaataagcaaagaccaagtgtgggcggtccttcctgaggac

SEQ ID NO: 2482 - DNA, 792 bp, Mus musculus
  misc_feature (159)..(159): n is a, c, g, or t
  misc_feature (276)..(276): n is a, c, g, or t
cactgaacaaatggctttcactacccaaaaagcaggttgactcgacagttaaggaatgccatccacatgtaaaataacatatcatccctttactctcttgtgacttacccaggataatgccaaatcatatttggtaaatggatgttacttgtgccccangtttgggaggctgaagtatgttcatgtctatgtgggcacttcttcattgctcatttttgctgataccctaccagaagaagcagttaaggatgtttttacatttttgctcagagcttntgctcttttagggtcctgaaaaatattaaaaactgacaaatatcctgtatacattgagaagcccattaaggcggattgccaagagtttgatataccccacattacaggcattccatataaccctcagggtcaatctttagtggaaagtgctaattgtcaacttaaacattattgaaaaataaagaatggggagaagaaaagtatgtattttccacaatattttatcatctatatattctttgattttttttttaaatttgggcacaaatgacatcaaaactaaagaatgcttggggagttatctgaaaaaaaatcaaggtcatgttcatttgaaaagatgtaatgccaagtcaaagtaaggacccagtttcagaaagtcactggagctgaggctacacttcgtgtttttctttaggacactaaaaaaacccttggtggacacctgatagtcttgaattcacctatgatagatccatgaagagcttccaaaatatcttcagagactatacctaaaga

SEQ ID NO: 2483 - DNA, 760 bp, Mus musculus
acgcggggcggcgcggctcgagagcacttacagcaataggaaatcacaaaaactgacagtgggttgggcaaaccgctaagagtgccagatggtgtgggaaatagcctacaattcatttcacttttggaggaagttagaaaactgtatgtaaagtaaggtcctagcttttttaaagcaagttttaaaaatttcttttcagttattaaagaactaacttactgaacaggagtaaaattatggtgaaaaaaaatagtgtttttctagtgtaaataggaaagcctgcttaaaccagaacactaatggaaaaggtcttcaaagtagctaagggaaaggattaagaaaaacaaaaaacacttttgaagaggaacattgaaattatccttgtgattgataagaattttaagtaaagcatgttgaggactgtaggtaaatacacacatgtacacatatacaccctgtgcgcacacacacacagttctactcaggtaaaaccttaaaatcagattctgacatcctagaagagggcaaagaaggaaggggctggagaggtggctcagcagctgagagctcactgaacttgattcccagttccatctgtagcgcctgcctcacgggatccaaaactcccttgtagcctctttgctcagagactctcatctgacatatcctacagacttacacatgtgcatgtaattagaaataaaatgttaaaatcctgaagatagtggatcctgaccgagaccagaataagatgagagat

SEQ ID NO: 2484 - DNA, 775 bp, Mus musculus
gtcgaggcggctcgaggttaaggcatgaggatttgagttcaaagctagcccgggcttgggctacagagtgagttctggacttaaacattcaaacagaaatctagtatggactggagaattacaagtttatgctgtgttagtttgcttgctctgacccgtcatctgaagacaggctcactttagtctaaactggccttcactaaatcatgctcttcccgcctcagcctcctaagtgagggttgtggaggtgtactgccacacctggtgtaaaagtgccgtttttagtagaatcaattgtagcatgtggtttcaacccgtaaggctgtggccaaattaaactaaaacacagcttttatccttgcagaacttaacataggagatgaagtaaaactacggaaataccaggtccgtggagtcctccagtcagctgtgggtctcagatgctgtctgttgacattcttagccttttagttggtggaagccagtggtgtgttaatacacacgaaaggttgtacctgttaaaagggtgtgagagatggccactaagtggctaatgatatagggagcccaggagaaattgtaattagttggacaacctcctggggccccccgaaaccccagcccacaagtcagttatcctccataagaaagtcagtttgtcttcagctgtgcatttgtgtctacataccacatagaggtaggattctgacaaaaatacccaagtctatttgcttcaaagattttgtagtatgcactgaagattttttttaactcc

SEQ ID NO: 2485 - DNA, 566 bp, Mus musculus
cgcggtggcggcgcggctcgaggtgatgccctctgtgagaacagcaagtgctcttcaccactgagcaatagtccctgcccctggatctctccttacacactctgtaatgaccatctatgtgtccaaaggctgataacaccatacttaatcaccatatgctccagcttctaacagaagcctctctcaacaacaaacacctccttgtctcattcggagcgagtggcttcccacgttggaggctgacatctacctgcatttcacagaagtgcaaagcaagtgttgagtttctaccttaacggcacctgctgcgagcatctgagaaaaaaaaatggaagcagcgtggctcgaaggatgcttttgaggaagttgggaacacatattaatagctctcgctggtagcatttgaaagtttaacaacagattaatttggctaataagttcacacacgactcaagcataaattctgcaaatgctggaactgtttctagacacagttccctgctgcacagtgcctggagcggtgcctggcctcgtgtgtgctctcaataaatattcgatgataaaaa

SEQ ID NO: 2486 - DNA, 771 bp, Mus musculus
gctttagttgtttcaaccactgcacttaagacagcccattcacaacagctatttacagtcctgtaaagagcttatcaaattattggcatgtaactcaacacacactggctgacagattgtgacccctatccttacattcacagaccactcatttcttctgaatataagaaggtcactaaggtcccttggtacatattcatagagattttaaaattcagtctcattaatgaaatccccccccaacacacacacagctttcccagcatcctggatctctttagaaaaggaaggagaagcctgttctcttgcaatctgcatgttaatcagttccacagatgattctactgcacactgcagtctgatgcgccattctctacatctaaaagtgagcctgaaaatagttgcattgatttgattgctttctatcagtcagtcaacatcgcgactctgggaactgaattcctaaagccaagaaatagacagcaacttaaaataatttcacctgatagctttcaaattagttcacatctcagaagctcagaatatggaaagatggaagtggagaagggaaggtccacaggacaatacactcccctctcccactactaccagctcttaagggtctaccttaccatttgaaagcagatttttgactaaatttttcttggtgtatggaagagaagctacaagaaaagaaataaatttgtccatattcctggcacaatcattcagcaaaggtgggtctagaagcccagacacttctctttgtga

SEQ ID NO: 2487 - DNA, 669 bp, Mus musculus
cgagtgtaagcttagttaatgctcatgattaaggagcatttaggtcttgggaaacaactgctgtaatttagtgaaatgctctgaatggtctcatcaaatgccctctcaataatgtggctatagattagtgttaaggttaacttcaactcgtagagatccgcatggccttgagttctgggactaaaggtgtgtgccactgcgctctgcaagtttacctttgtgtatgtgtacatgtatgctgtgtgcagctgcctcagaataacaagggagcactggatccttggagctgcagtacaggagctactgacaagttctgggacccaaatttgggtcctcgggaagggcggcaagtactttacctgcttaggccatctctaaccccagaggccttgctttgcgtgtcgggcgggggtgggggtgggggggagacagtggtaactgcagatacaccttactggtcagagtgctgagggtgactcgaatgctcagtcataaatgatatattcatattaccccaaggcttagaggacatggtgaaacagggcatagataggagctggaggatgatagagtggggtatcatgtggtcttcagggccatcttgagctccagcagctgtgattaactacataagattggtcttgccaacatcctgttttggaaggggat

SEQ ID NO: 2488 - DNA, 725 bp, Mus musculus
ggtggcggcgcggctcgagttgaacgtggaggacatcgtgacctggctcaagcgccactgcgacgtgctggccgtgcccgtgaaagtgagcgacaggttcgggatctggaccggggagtacaagtgcgagatcgagctgcgccaggggagggcggagtgaggcacctgcccggggccttcttcttgggagcggagaggggctacagctggtacaaggggcagcccaagacgtgctttaagtgtggttcccggacccacatgagcggcacctgcacgcaggacaggtgtttcaggtgcggggaagaggggcacctgagcccttactgccggaaggtcatcgtgtgcaacctctgtggcaaaagaggacacgcctttgcccagtgtcccaaagcagttcacaattccgtgacagctcagctcaccagcgtggcggggcactgaaggcgcgactgcctgccagggtgaatacactgccagcttacccctcccttaagtgccaaaacttttgtttttaaccattttttttttaatcgtttggaatggagatatttctaaaacctaccagagacgtgctctctatgccttttttaaaccgcgtgtgctcctttttggcatgtttgaaatggtgaattttgtgcccgtaagaactattcagaaccattgcatacagatatattttttttctcccgtttgtattggttgggtactttcgtctactcccctcc

SEQ ID NO: 2489 - DNA, 619 bp, Mus musculus
ggatacatgaagtatagaatatctataaaaatgttctccaccagaggtactactatattaattcctatgtattgctgttcaggcttgagataccgggcaaaagtgctatgggaagtggaggttcagaactccaggtatcaggtacactccacaagactagggttggcatggggtgtgtctagagcctgtgcatccaaactgtctccacacaaagaagcaacaggattcatgaacgtatgtccaacagcctttgccctccctggcctagcccagaatgttggggttagtctgctgaggccccaaagaagatacgacttcaacacggaaggcagctgtctgaccctgtgcagagaaagcagccgatgatggcgctatggctgaaggttctattttattttcaaatgttggagactgaacccagagcttcctctctgctggactaagttggtgcatcctaagacttccttatagttgtgagatgttggttggttgtctgtttgatctctacagctgcaatggtttagatatggtctgagtatgcttgagaagttcatggctgggagcttgcagttggtctccaggctggaggtggtgggacctttaagaggtagagttgaag

SEQ ID NO: 2490 - DNA, 698 bp, Mus musculus
gggtggcggcgcggctcgaggcatcgctttctgaggggaaatgtttttagtagtcttagttgctcaggtgcttttacctaaatgcattgttttcagactgtatgtcaaccacagccacaaggaccatgtttgacagtacctccctagttactggtgtctgcctatctttggtaaattcattacttcctccaaattgcctaaagtcctagtaaacaatagctcaggggatttctatccatcactactaacagggcaccgtggtaggtcttggtactttgggcagcaagcagccgcttgacttgtcattgcttggggacaagaacaccgggtggatttgctgcaccagctccgcttcacgctattgagcagcttgggttgtgcatccattgcacttgttgatgagcccatccctttgtggtcttgtaacatgacgttagagtgcctttttatatttgtatatcctggaagtgttctgtgaagcattttgtattttttcatttgagtgttattggagcaatatgatcctagtgagtttccctttctttgaatgtaccaagtgtctcctttcctagtcctctcctcctttgctttgaaatgaaaatgctcacgttttctagaggaactatgtttgactttgcagtactaaaatgctttcttcttacagaactgtaaaccataggtcagtattataggggaac

SEQ ID NO: 2491 - DNA, 657 bp, Mus musculus
gcggggcggcgcggctcgaggcggctcgaggggaaaagtcaaagaagctggttaagtggggggaacacggaacatgtgcgttctcactccagacactgttagagctgagaccccacgcccaccaggcccaagccttcctgttaaaggtgaatctctcccttcttgttgagaggttcccagctgggaccagcggcaaaggggcctgtgacttatctgtcatttgtcctggggagtcactgatagaaccaggcacatgccaggctcacctggggctacctctgctaagcttctgataccctcccccgggccgtgaacagtgtcgggagggagagcagcctcattctgagaaagccactctaatgttctgtctggttttacaaagagctaagcactgctctcctactgtccccaagtgtcactcaagcctaagacgagcctcctctcctgcaacctcgtacctacgctgttggctcatcaagcctccttctccctgtggttcctaccacgaggctgctggggtgagcgcgcacgcacgcacgcacgcacgcactcgctcgaggagcatacatgctctgtcagagccctctgccctttaactttgagcatcctaacacctcaggccttgggcttcactgcctctatcccaaggcctgaggt

SEQ ID NO: 2492 - DNA, 212 bp, Mus musculus
agcttctaaattaatgacagaaagcaccagcttggttcatgacaatctccatataaactccctaggaaaacagagagtagacccccaaggacctgctccagcatctactgtggctttggaagtggcagggtcaggatttgggttgttccatggtactcccacagacatatttgaggacagcagcatgctgaggggaaagtgaggtttgtttc

SEQ ID NO: 2493 - DNA, 623 bp, Mus musculus
cttcaataatattaatgtgaatggattctgagctctccctgtgccccgggtgggccagacagagcgtttgcactaatgtgtcccattgtggacgttgtggggatcgtttgcagacatgcatggccaatgactgtacctgcttaggggaggggcactccctctgcatcctgaatgtactgcgaggcaggcgggtggcaggcatgggctccgaggggccttccagagtgccttagcatcttttgattatttttttcaaggaaaaccaatttaaaaaaccagactccctcctttgtttacaagatgactaattccagaatcggggctgtcttgtcctgtcacgtgaccctgacttgtccagaccctataggtgagagcctctcagcatttgtcagatgtctacacctctgttcctagcttgactactagcaatatgcacatactatgtagagtctattgtagaaactattgctacatcagcatctttgccatgacgacagtcgggactggatagggttggagctactgggacagagctggatccagccatgagtcttatgtcctcccagagcagacaatagtccctgaggcagctgggacgaatacagcaggtctggggcaaggga

SEQ ID NO: 2494 - DNA, 696 bp, Mus musculus
  misc_feature (287)..(287): n is a, c, g, or t
ataggggaatggagctccacgcggggcggcgcggtcgagagccactcactcggtccacactggggtctttttaatgaagctctgcctcataaccaagaacctaagaatgccctcttcctaactttgcccctcccctacacccgcgccctcctgtctgtctgcatgattcctctaaacgatcttgcatctgcagtaataccttttagtatagcactgtcagtacctggtagtaaaccaccatggaggcttcagattgacatctgagtccaaacaattgtgctatccanggcagttaactctgggttaaactagtacagggtatcgattccctcttcaggtctaaacaggaatttttactctagggaaaagtggaaagagctcaaaagtagtttataaggaaggtgacttccttctgtgactacaggtctctgagaaattgtctttcaaaagagattgcattgctcataagagtgttgtggcctattgataaaaacaattttgttcactttcttgtcttgaaaaaaaagtggccttagcttttgcaatacttgaataaagtgtgtacttgcaaaagaatttctgtagcacagcattagagactcataacttttctgcaagaaattcaaacttacatcttccttttactaccttaagaatactagtgaataaaacattaattcaaagagcaagtgatag

SEQ ID NO: 2495 - DNA, 801 bp, Mus musculus
aatggagccacgcggggggcgcggccgagggaaaatattagcatatttactttactacatactaggcattctctgtttacatcccaagagctgcattgtagtgaaaaatcatttgtattgactatatttaaaatatgataaatgtcatggtagacattgatacttctgcttgctgcagtgtctgattttaacttttcttattctaggcttctggttactcccgttcccaccctatcccttaattttatttttctgaagaatctgcagttcaagctatcaaggtggagagagcaattacagaaagacgtgttcatgtttcaggtattttacctactaggtgttaacaggagaaccatttgattgaagagctaaaacgataggatagagcttaatccttaagcacatggcatttaaatcaacaggaacaatctgtattcctttacaaatttaatttaaatctcagggaatattcactagacggtcttaagttgtattaccctgtgttacatgagaggaaaatctattaaagtgagtttatattttcttaagattctgacctttggcacaacagtaggcagaataactcataacagtatgcattattttaaatatatcttaattaagataatataagtttatattttaaactggagaagtagtatctacttttggtctatagtttacttttgattgttaacacataatgcttagaatacactagagttctctgtcttggaacaatgtgtatttttaatacagttattagaattcttgcaactctgaagggagagttctggtata

SEQ ID NO: 2496 - DNA, 627 bp, Mus musculus
tcacgcggggcggcgcggctcgagcatagacttatgtgtttgaattacatagggagtggcactattaggaggtgtggtcttgttggaggaagtgtatcactgtgggggcctggctttgaggtctcctgtatccaagctccgcccagtgtggaacacagtctcctcctgactgccttccaatcaagatgtagaactctcagcttgtctagtatggctgcctgcatgctgccatatttccttccatagtaataatggactgaacctctaaaactgcaagctactctcaattaaatgctttcctttataagagtcgccttggtcataatgtctcttcacagtaatgatgaaattaagacagtaagtgtgtgtcttaatttttaattctaggactttacaaaacaggggtaaagacaaatgttcaaaaagctcttgagcacagatccagaatttacaaataaaagagaaaactggctgagcttggagggttggggtgactggtatgtagccgagcttagccatcattctgattttgtatctgagaatagtgaggtgtccaggagccagtccaatgtggagcccaggagacaactatagcatggaacttgcaggacttgcaatatattgaat

SEQ ID NO: 2497 - DNA, 410 bp, Mus musculus
attaacataatcagcagagactgttgagatagtatgcaatagtccttcatcacacttgattcaaaaaaacctaagtactagtgttctaccatcttgttctccctttcttttcattgaaaaaaaaatgaccacatcttgtcttataaagtaatgaatctcgtgtgtgtgcacatgtgcacccttgcatgtggttattggttgtaaaaggtcatttgagaaggacttgagaatgtgtgtaagtagttgtctttgttctgatatgttgtatagccctaaaatactttcagtcaagtacttcattgctctcccacactgtcctagtttaatatttacttttctgcttaaaagtatttcactggctgcataataataatctaggaagttttaggaattggaattactgggaaaaa

SEQ ID NO: 2498 - DNA, 703 bp, Mus musculus
agatcccggaaggaaaaagcccagcctactccgaggtagaaaggttaccgggaattgtcagcagctccaatgcctgccctgaagtccgctcccaaccataagccgtcccagcaccttttgaacaattttgtgaaagccattactctgggtcaaagtgggatgatggcttccagttagctctacacagcacagcatagggtgttccaaggaggtaggagatgtggattgtgttgtcaggtgagaaagcagaaggacccactgaatgtaaagcaaaggcttgacgcagcttggtcctctagagaaataaaagcatgtgggatatatggggaaacaatgctaatttcaatggtttgccctcacagactgaaaactaggccatttccaaaggagggagcagtaagcccatgtgactgctgaattttaactgggtctgatttatgtagtgcacatccctgggaactgagagagtaaatcctggggtgttactgacttctgaagaggagtgtgggaaagactgtcattaatgtcttatttataacattggaattcatactgaatgatagctacctggtatgagtaattcagggaatgtatctttctaagaaagttctcaatgtgactattacactttatttcttctatgtagcagcaaagatgtaaaggccagacttgtggtcagaaattagaacaagatgcactcatc

SEQ ID NO: 2499 - DNA, 679 bp, Mus musculus
cgcggggcggcgcggctcgaggtctaagtctctccaagagctgcagattggcacctatgccaatattgccatggtccgtactaccacgcctgtctacgtggctctgggcatctttgtacagcaccgagtctccgccttacctgtagtggatgagaaagggcgtgtggtggacatctactccaagtttgatgtgatcaatttggcagccgaaaagacctacaacaacctagatgtgtctgtgacaaaagccctgcagcatcggtcccactactttgagggtgttctcaaatgctacctgcatgagactctggaaaccatcatcaataggctggtggaggcagaggttcaccgtctggtggtggtggatgaacacgacgtggtcaagggcatcgtttcgctgtctgacatcttacaggctctggtgctcacgggtggagagaagaagccctgagcatggggaagaacaggcggtgcctggggaggtggccccctcactgcctgcctgctggaagctctgggaatcagatggaatcctgggagaactgagtcttctctcaggagctccacgcccactgtctagagctagagaaggggaaaggaggaggactgtcagcctccctgaccgtcctgttacactggagagaacgtcagcccagccagtccaggcccgcgcctgccg

SEQ ID NO: 2500 - DNA, 678 bp, Mus musculus
accgcggtggcggcgcggctcgaggttgaaagatgcacaggactacttgttccagagtaagctttcggtctagcagaggctgcgtgtcgcctctctggcacaccactcctgacctgggtctggggcactggtcctctgttgtccccacccaaaccctatttccagtctctggggctagaagccaaactgagtggggcttctggaaagacaggtccaccctcagcccccagccaaggccacaatgtcccctgtaatttacgatgaatgtcctctcaggacttgccatgtggagtatttacagccctaggcagttaggtggagtggtggcctagggccacacagcttatccctgccatttatctccagcctctcagtcttcccaagggctaaggatgtcatctctgaaagccagtggcagtggaggtgcaaagcggggggtcccagcccattgtgggaaatcccagtgcagggcctctaagtgggttccatctctgagccccaggggtcagagctgccctggagatatatctgaggcttcccctacaagctccgaggactgcttcaggcctatgttccaccctcctattgtagcttgacatggtgacagtactggtgttgacagtcacagaaataatccctctaaaagcagcttcaggccatagttgtgcgagaatggag

SEQ ID NO: 2501 - DNA, 757 bp, Mus musculus
  misc_feature (679)..(679): n is a, c, g, or t
cggggcggcgcggctcgatgtcatatctgcctttgtggggatcgtagaggttaattaccacaggcctcaaactcaggtcccatgtgttcagtgtcctgaggtggccctccccctgcaggtcactaagaacacccagagaacatgacattgctcacggggagctcctggggccccctcatgccagcataacactgctgggcagcttggagcttctggcccagacagaagtgggctgggacacgaggccatgctgctaggcaacccatcagcgcatttctgctgatcaccagcttggccctgtctgtggatgacaagaggcctctgctcttgacccttaataatagtccagggcggggacatggttcccagaagtcactggtcctgcatgcttgcctacgccagtgggaaacagggttgaggggtattgcacgggatgcctggtgggtctgctaagtgcagaatggtccaggtggacctcacgagaagaagtagaaagttgaagatgctcttgatggctcggtagctctgcttttgggggccctgtgtgagccactccatgaccaggtgcccaggcacttcctgactccgtatggtaatgactgaatcaaggcagaagtaaaaggcttctgggagccttctgaaagaggtcaggagcctcccacagggcagcacaggaatnttgcaggtcatcaagggccctggttccaccacttccccagcaggcacaagttgtggtgtgctgggtcttctttactcc

SEQ ID NO: 2502 - DNA, 767 bp, Mus musculus
ctcacgcggggcggcgcggctcgaggggagttttcactcagtggtaaagcacttgcctagcatgcaaagggctttgggttcagtcctcagcactgcaataatacagttaaaataatgtcagccctactgtgccagaagtcactcaaagaatttttctaagtactgtctggttccccattatttctccattatgtactgtataacgtcagcacctaacctttaaagtttcttcttgtatttcttagaggaaaagatgctttctctttggtgcctcatttatgtggctttgtgacccccttggagcagtttcaatctacaacaatgtacttttaaataaccagattcaaaacatgaagatcattttttgatttgaattaaatatggaagggcaaaaccccttgtgtgataagaaatggaggggaaacaaactctttacagagaagtcacagaaggagtttttcaatcaaatttcttctaacaaaagacaatgggatatttatgtacagtgtgtggaattcattttctacctttcctaatatgtgcgttcaaagcggggaattgattgtatcatttctgtaaaggggaagatactttttataagccacaggtaacttgtgaatgaaagacgaaattcactggagacgcttgatgataatttgacatttaggtatattgttatatatgactgattgtatttatgtattattgctcaaattgtacatatggttttgccaaaaggtaactgtgtgttaaaagtgcactcttgg

SEQ ID NO: 2503 - DNA, 442 bp, Mus musculus
ctgcagattggcacctatgccaatattgccatggtccgtactaccacgcctgtctacgtggctctgggcatcttgtacagcaccgagtctccgccttacctgtagtggatgagaaagggcgtgtggtggacatctactccaagtttgatgtgatcaatttggcagccgaaaagacctacaacaacctagatgtgtctgtgacaaaagccctgcagcatcggtcccactactttgagggtgttctcaaatgctacctgcatgagactctggaaaccatcatcaataggctggtggaggcagaggttcaccgtctggtggtggtggatgaacacgacgtggtcaagggcatcgtttcgctgtctgacatcttacaggctctggtgctcacgggttggagagaagaagccctgagcatggggaagaaccaggcggtgcctggggg

SEQ ID NO: 2504 - DNA, 630 bp, Mus musculus
gcggtggcggcgcggctcgagtaattttcatttcttttatttttttaattggcaaatcgtaagccagctatatacatatatatattacattatcagatctagagtttcatagcaagctttaccctgagttctgttgcagacctagaaaatgctaagctcagagcataatttactgaagtgtaattatctttttttttttagtaggagtttatgtcctgtgccagagggacttctggtgctgattttaagacaaaggataggggatggttgtggcgtggctggctggaaggcactcagacacttggcctgctttcacagtttcctcacacctgcttttaacagcatttagatgcggaagccttatttccacatagtaactgcttctgtgggtctctttctttttcttgtgtgtctttcctttcctttgcttttttttttccccacagaatagggattcagataaacaaacacttttgggtaagcaagttgttggtttcaaatttcagagctgtgctttgaagggacttaagaatcctaagtacctccttgtcttgtgtcacacctacacataaggacacagatacagatacacacactcacacacacgtacattagagcatggggtttttt

SEQ ID NO: 2505 - DNA, 693 bp, Mus musculus
  misc_feature (628)..(628): n is a, c, g, or t
gtctttgttctttccccatcttagctaaatgtcctaagattagaccatattttttatatggagtcctgtcatcacatgctcaaggtgcttagaacgtctttaaaacagtcatgccatgaactgctatgattatgtgctagggacactagctcagtggcttcttaaaagcccttaaaattcaaaacttgacatttgcagaatggactaatctacatgttcgcacaatgaaccttgctaaaatacatgttcagactgcttgtttgtcattaaagaaaacctatgagatgtgcatgcatgcacacacacagtcaaagaactttcagtgaggtttgggctgaaaatataaaaaaaatatcaaaaatcttatttacaaaaacccatatggtattgttaaagctgaactatgacttaatacagctaggattctaaaggaaagcatgtatcagaatcttttagagccattgtaatgccgagtgcgccacttctcatttttatgactttgctcatccttatgtatgtgaatataaattagcatatgataacagacaatattctgcgaagctgtgtcctgagatattaaggacacactgtactatacttgaatccaaggttggagatttatttctanagatttcctagcctatacttgttttaaacttctagcaaataataacataacatatatatctacac

SEQ ID NO: 2506 - DNA, 763 bp, Mus musculus
gcggcgcggtcgagtagtctcaaagggcagctgcgtatttaatctaactctgggttatgacctgacaaaaaagccaaaaatctcactctttccaggagtgggggagtccgcggatgcctcccaaatctagaggcttcacaaaacatcatcccatcccttccctcactcaccctctgagatcatggtacccacttgttaaatgcatacttcaaaatgccattgtgggaatgaaggttgtccattaaggaaagggtgaatgtgtcactcttatgatgtctctacgggtgttggtgggggggcgctttctttagggggtactggttctttttggctagacccaccatggcttgtgacctagagcacccaagatcaacagaggcctcatatttaccctgaaagctgattccaagggatttatattgctcacttgcatatcacacacacacatccaatgttggtttctatcttcccgaattcttagctagctggcactggcctaaactccaaagactgcctttaggaccattaactggcctatgcaagcaagcggggtgggtattaaggcagattgtatatttgtatattctgggaccatcccttcaagacgcgtctaacaaacaaaagtggcgttggtccgtacaagttgctgcaccctcataccagctggctccctcctgcctcctctgactgttttatccactgactgttaaaatgccgccatacatatttgggatgcaaactgaagtctttaaagaatataata

SEQ ID NO: 2507 - DNA, 681 bp, Mus musculus
cgcggggcggcgcggctcgagcccccttttactgaaaatctcataatatgtttaatgaactcatagaattatataaaacttactatgcattatgtttaatatttgtatcaaaataaaatctctctgttgaacaaattgcaagtaaagtctggtctaccactctgatgactgaaactataagacttgtaggctctcttgaaactcatttcagaagcttcaagcttaccactggacaaatgggctggattagaaccacagctcacaagtctaagtctagagtcttctattatgtacctcctgacataaagtttttttctttttctttttttcttttttaaacaatgcaggttttgttaagtagatattttcagtaggttcgaaatatctgaatgttacactaaaactttaaacataaaaattgtttgacctgatattctagcttagagttgatgatataatgccactttctgatgttttattgggatgctaaacttcagtaaaaatcccctccttctgtggtcttggaattgctagttaaacgagggataaaactggcaagtgtgaacctcgaagcctctgtcaagtcgcagagggaaatgtgaaggcttgatggagtggatgctctgaggacccgtatgacgggtactctggggtacccaggctaccagggacacaccaagt

SEQ ID NO: 2508 - DNA, 635 bp, Mus musculus
gttctgggtcaaatcctggatctgagcagatgtcgataattagtggtgatggagcaggtgaggttttcagtgttagtcaaataaatcaaacaacatgtgcacctctttggtcaggctccactgcttgtagtccctggatgattggatgctgcatctgcccaagatgccgctccatcatcatgtgatagtcgttacacacagggcctcttctcggaggagttagggaacatggagaattaagccttaggtctgtctcttccttcactggccatctgcaagcccactgagtgtcacttctgagctgctaggctgctaggagacagacaccagttcatgtcctggcagtttgtcctgctacatgtttggtattttttaaattttttaattttttctccagtttataggaaagctatggcatattcctggtgtactttatttctgaaaagtttcatttctttccttgtttgaaaacaaaaaagaaaagttttttttccccccgtgtttgttgttttttttttgaattcctatccatggaaagccttctctctggggatgtttgcatgtaggtctgtgctcgtttactctgtagcacctacaaaggtaacttcaggcagagtgactatggaataagtctg

SEQ ID NO: 2509 - DNA, 615 bp, Mus musculus
cggcgcggctcgaggtctgttctgggtcaaatcctggatctgagcagatgtcgataattagtggtgatggagcaggtgaggttttcagtgttagtcaaataaatcaaacaacatgtgcacctctttggtcaggctccactgcttgtagtccctggatgattggatgctgcatctgcccaagatgccgctccatcatcatgtgatagtcgttacacacagggcctcttctcggaggagttagggaacatggagaattaagccttaggtctgtctcttccttcactggccatctgcaagcccactgagtgtcacttctgagctgctaggctgctaggagacagacaccagttcatgtcctggcagtttgtcctgctacatgtttggtattttttaaattttttaattttttctccagtttataggaaagctatggcatattcctggtgtactttatttctgaaaagtttcatttctttccttgtttgaaaacaaaaaagaaaagttttttttccccccgtgtttgttgttttttttttgtgaattcctatccatggaaagccttctctctggggatgtttgcctgtaggtctgtgctcgtttactctgtagcaccta

SEQ ID NO: 2510 - DNA, 592 bp, Mus musculus
ctccgagggcatttggcccgccgctaaattgcacattctgagctccttgattttgcgccgcgtggggtcagggacgtcagccacctccatcctaagaagctctgcctacatcccctccatcccctcggaggactggcacagagatgagaagctgagacattgctgctcgggcctgcaggctttctgcacatcccacttcactcttcccttaggcagaagttgccaacctcccataattggagcctagccctttagggaaaaacaacttatgtgtcaaatgagtgttttgtgctccaaggcatagaaaatgagaaaagtgctctatgcgttttaattcatatgctttaagaatgtgggcaagtctcaaagaaacaggattccgaggatggctgagttgtcctgcatctcttatgtaagcctcctggctgggtacctttgcatctgcaggggctgcatctgggcctctactcactccattttttttttcaagtccagcttgagccgtatttaataaaaacgttgacatgatatagtggttcgtagtcagaaacagggcagtctttaaattagactgtcttctcctaatagggag

SEQ ID NO: 2511 - DNA, 769 bp, Mus musculus
gaaatggatgaactaagaaatggaaagcaatatatttcagttactgatgacaaggaacatctactggttaggttagcctttgaaagtttgacaatgttgtgtagatatttaaaatacaactagttatatttgtcagctggtatttaaaactgacttgttctgggtcattattcttacttaatttaaatttgtgctgccttgatgctctcagggtgatatttggaggccaggtttattttaaggtgtgactttgaacctgtttcttggcttagctagtcctgttttctcatctgaaaaatggaggccagacacattgtctgatcaatttgtggaaagtattcaatgaagggatgcctaaaaacactgatgtgaaaagcagccaacaaattagtatcttgtcattattattaaatatgattaagcagctggtcagatgttacaaagtattaatcttacctggggtaacaaagactgggactctacatcacaaatgcagtggttcagtgactctgggcagatccttggatacattctaaagtatctaggcaagtgttctttcattattagagaaaattaagtaaagggactctacatcaagacagtgctgctagccaccagctagccagagaagtggtgactcgtgcaaaacaccaagaagagccccccatcttacatccttagagagatcttgggacagagaagcagtgcaatctcagaagagaggaccatggcttttgccctttatgcctagagatcaatccctgaatgc

SEQ ID NO: 2512 - DNA, 762 bp, Mus musculus
cgcggggcggcgcggctcgagggaagacttcatcaggagcgagctgaagaaggctgggggggccaactacgacgctcagtcagagtagctacagccccacagcccagagccatctgcctgctccgccaaggaggagactgccgcctcacgtcaccagcccaccagggaggagaagccatgagaggcaccagcgccaccagtgtgtccaaccctccccttccctctcccccctgtggcccctctcaagctcaccaagcatcattctttgagacccgcccccccttttgttttaaagaagtcattttggtgccagggtcatgcataccatctgatcccagaagcctctctgtcactggccctggacctggcatttacccctgccgtcaccgtggcctgcctggtctaagctaccctggccttgagttgctgaggcctggtcaggtgccaccccagcttgacctggctgtttcctgctagccctacgccggccaccaataccaggagctgtgcacaccttacagcccttcatgagctcccatgcgcgcgcatgctcctcagagcccatagatgtggccccaggcctcaaccctgtcctgttcagagtggccttgagctgtccctctggtagacacctgcttggcagtaacaggttccaggtctggcgtggaccgagtgtgaacgtgacacattcgccttacatcttgcctggccagtggctctgccacgtggtctaaaactacccttttggccgaagcctttctg

SEQ ID NO: 2513 - DNA, 804 bp, Mus musculus
ttggctggcacttggatgctaggcaccaatattctagatttggacctttaaaactgagttcatgcatgcacaggtctgtggatcacagatgtgatggggtctggagattgaaacagggtcctctggaagagcagccagtgcttttaacatctcttcaggccacatactcagcttttaatgataagtttaaccgctgaataatctctccaggccaattactcagcctttttttttgttaagtttgggaacttaaattcaggtctttattgtttgcccagaaagctctcttacccactgagccattccccaacccttgtttttcattttgagacagtctctctaccctaaactcattctgctgtccaggtggcctatgaacttgccatcctcctgcctcagtgcctcttgagtaggtaggtaaggttaaaaatgaacagcactacccagctatttttttttcttttagagtgtgtgtgtgtgtgtgtgtgtgtgtgttttatacaggcaattccattggcctgctttcagggacccagccagtgcttacatcatgacctacggcagccagatgtaccagtagatgtaaggacccacctgcaccccagtctctctctctgatctccaccaccaatgttccctctccttctctgtccccctctctctgccctcatgattctgccccccatctgtctgcctgtctatctgtccactttgtcgtgctctgtcccttcaccaagtcccacagtactcttgcgttccccccaataaaacctttacactaggtctgtttatgggtgtaacttc

SEQ ID NO: 2514 - DNA, 756 bp, Mus musculus
ctcaagtttactgactgaagggacaataaggctcaggcttttgccttattggattctgtgctaaacacatcacttaagagagttcctcaagtaacaactatgtcctttccatcccagaattctcaagctaatttgtacagacaaggatcaagaagtagagggtgttagacaagagtcttgaacttagatctagtatgtaataaagtgatgccgagtctttattctcaatgtgttctttactggtcctttattagttggtcctagtgatagcaataggcctgtatgttggtagaaaccacttcttattcactagactgtaattgtttactatgtcccagttttaacttgctgcctagtgggcagcaatagacactgttgctgtagactatgctttgttctcccgcaccagtgattcagtttgttaacatctatatttattaaacttgtcaaaattgataaatagagtagcagctcagacccaagaagatatttttgaaaatcagggtttcattaaaagtactttctaatatctcctaaatgacaagcatcaagttactgttaatgacagtgatctgctcattctacatgggaggcttaacaaataagtaatatatgctgacttctgcaagtgtctgtcgcttaattgtcaattgtgagcagattatcgaatgcctcatctattttctgcagtttactacacaataactctttgaataagttgaagtttaatcgtgcaacaaatttctatcagagaac

SEQ ID NO: 2515 - DNA, 529 bp, Mus musculus
accgcggtggcggcgcggctcgatcctgtgcatcaaactcgggttacaggcctgggaacatgcacctttacccacggaaccttcctttacccacagagccttccttcccactgaccctgggaaacaatcttaacagcagggagtcctgtaaagcagactcgtgccctgccaaaattgcccatcatagctctgctggggagcagttaagtgtttgtcaaatgaacataggaacccacatcttgtgggtcaactcagctggcaaggatatttctcttgtctgtcccccaggtttatgacacaatgactgaagtcttgttctaattaaaatgttcactggggacctgttaaggtttttctctggctgcagtggatggctgagaatatctatctgtctgcagatgtttcagacaaagttatgtctccgtggttcacaaagatgatgtgtggagtcatgatcttccacagtcagtcaaaaggatattgatgttacaaagcccagtgatttcaagaacttgaacactgaagagtc

SEQ ID NO: 2516 - DNA, 848 bp, Mus musculus
gttctgagcctgtaccgcgagctgctgcgcgccgggcgcgggacgccgggcgccgaggcgcgggtgcgggccgagttccggcagcacgccagccttccgcgaaccgacgtgctgcgtatcgagtatctgtatcgccggggtcggcgccagctacagctgctgcgttcgggccacgccacggccatgggtaccttcgtgcgcccgcggggtccggctgaagagcccggcgacgcgacagccccggggaccaggctggatgatggtggtgccccaaagaattcttgtgaagatacaggggcgcgggagacgcgatccgatggacggtgacagacagacctagaggaaggttccttctgacagtttggggaggatcgtgaactcatctaaatggaagctgagatgtcttgagagataaccgaattttcccgatgcatagtgagagatcagacactccctcaccaaggaggttccgggcattctgtggcactggcggactgcataagacatgctgtgatacaccaacccaaagtcaaagagagagcacaggcgcactttctcctcccatcggggccgtggcacctcttgacagacagctctctttgacttcttaagaaacaacccacctcctcactccccgccccttgctgtttttaacgtggagaagacagactttttgccgcgctcgtttaatagaataccctgatgaaccgtgagaaacttggcagtctgactcgttgtgaaagaaccgggttcatgagggagattacactagctcatctcagctgatgagcttgagactcttgggagaatccctagtcctactcctgttagtcctcaggattcttgca

SEQ ID NO: 2517 - DNA, 735 bp, Mus musculus
tacgtcgactcgagggggggccggtaccagcttttgttccctttatgagggttaattgcgcgctgggcgtaatcatggtcatagctgtttcctgtgtgaaattgttatccgctcacaattccacacaacatacgagcagggagcataaagtgtaaagcctggggtgcctaatgagtgagctaactcacattaattgcgttgcgctcactgccgtttccagtcgggaaacctgtcgtgccagctgcattaatgaatcggccaacgcgcggggagaggcggtttgcgtattgggcgctcttccgcttcctcgctcactgactcgctgcgctcggtcgttcggctgcggcgagcggtatcagctcactcaaaggcggtaatacggttatccacagaatcaggggataacgcaggaaagaacatgtgagcaaaaggccagcaaaaggccaggaaccgtaaaaaggccgcgttgctggcgtttttccataggctccgcccccctgacgagcatcacaaaaatcgacgctcaagtcagaggtggcgaaacccgacaggactataaagataccaggcgtttccccctggaagctccctcgtgcgctctcctgttccgaccctgccgttaccggatacctgtccgctttctcccttcgggaagcgtggcgctttctcatagctcacgctgtaggtatctcagttcggtgtaggtcgttcgctccaagctgggctgtgtgcacg

SEQ ID NO: 2518 - DNA, 852 bp, Mus musculus
gtaatttcagatcccgtccctttcggatccactaggtcacattgctgcttgtgccaccaagatgcttcctctccagtgaagtgtctcaccacatggcagttagctcatctctggtcttttctaggaactggatcacctttccttaacatcacacttctttttagttaccaatgtgcttatattggcagagcctgacttgactctgagatgttgttgctaccacagactagatatgaaagtcctatgataacttaagacaatcactgcacatacccagctccatccactatatcacagcccattcctaggaaacagcaaatgcctcttttgcttagcttttgcttcatttcaagtaactagatgtttctcaggttttatggccatgagacaatttaccttccacgtaactctgttctattcagcaaggtcttttcttccttgggtcatggaaagtaacattttcgggtcacctgcctaggccttcagtatgagtttgtatacctcaggcaccagcttggctgggacaaatgtcttcatcctgaccttacacaaacaagcctgatagttactggtcttatgggtgacctaggacatcactgttccaatgagcacgtcttctaacttggggaggtaccacggagctagtcttcacaagactgggccagtaggcaaaaccctgttgatctgtaggcttacagatgcccaggttctgaaggtcgctgtgttctgtagctgttttgagtcttgctgggggaagatggtgaggcttctcaggcatggacatagatcttttacccgttagcagttctctgggttctctggcccatttgatctcaaatagtaatggtgaaa

SEQ ID NO: 2519 - DNA, 327 bp, Mus musculus
ccgcggtggcggcgcggctcgaggttctagatcgcgactggagttttttttttttttttttccgggccggcttggaacactctattttttccaaaggtaaacgcttcgggccccgggggaacactcagctaaaagctatcgagggggccgccgagaggcaagggggggggacgggcggtgactcgcctcgcgggggaccgcccgcccgctcccaagaatccaatcaacgagcttttaaactggcagcaatctttaatatacgctatgggagctgggatattaccgcggctgtctgggcaccagatcttgccctccaagggatcctcg

SEQ ID NO: 2520 - DNA, 768 bp, Mus musculus
tccagtgatggccgactaggccatcttttgatacatatgcagctagagtcaacaacattatgcctccgccttctaagtgctgagattacaggtgtgtggctccataccctacttcacaggcgttttaaattgggagaaatatcacgttctagaatcaaaattctcaagcaaagataccgcctgactcggagctaaagttggctgacctgctcactgccgttcaccctcccggtcctggtccctgctcgggcttgtccctgctgtagacatgctcatatgcgcttgatgactgtcctaccccgctttgtttctgtccccaaggtctcatgtcatagcatgcccttttctttgaactctgtatgctgagctaaagcgctgttttgttctgtttctcttaaagaggaccgggtcaccttgtttgtttctgcttttgagcatgctgattttttcaagagatgtaaatttattcatagaccacagtgccttgacttaacccacactgccaactggagcaccagcacgcgaatgcacaaaccggtttaaggcactgtttctctctgccttttgacatgtatccaaaaattatagcctactagcatttcatcttagtatccagtcgttcagcatgatcactaacatttccccgtacttagctgttgtttaagtatcaaaaattgatatgtctatactgtgtctttctttttcctttctggtattaagaagagccatagctggagagatggctctgttttaagaatgcatactgtc

SEQ ID NO: 2521 - DNA, 687 bp, Mus musculus
gcttttgagtagaaacaacctccgtttgaaactcacctatatgtttattagcatggagcctgaatgaatttcttagctaatccagcctttctctttcctgtgttaatcttaccaggacagaacaagacctcaaccaaaagctttgagccaaatttgaatcaagcttgtttaaatcctggccgtggcgatggacactagccaactccatatcctggattcccagagggtggccttgaattacattagtcaggtgctgataaaggcaaaacccacaaggcaatgtgcttcccacctttgtccagtgaggggcaagcacatatcctgaggtacttcctgcctacgtacctcccacctacatgtgatcaggcatagcctgtgcagttggggcaaccaaccttgtttacagaagtgagaatatgtgacttgtgtcttatataacagcccccagcatcccagcaagttatctgttcttggccaagtggggcttatgggttagaagcatttttattttatagatctcctaaacacagttatttaaacttaaaacataactttagccctcacacccgatttatcatagaagaaatgatataacttagttcagggataaattaaaggattaaagttaagatgtcctgcagaggcaggaggatcttgtgagttgagccaatcttgtctttatagaga

SEQ ID NO: 2522 - DNA, 783 bp, Mus musculus
ggtggcggcgcggctcgaggatttaaatgtctttactgatgtgaggactttttaaaaggcagtagtttgtggtgcagctccgtggaacaggttgtgtaataagaaacctcagaagccaggcttcaagggggccgggtgtgtgtgtgtgtgcggggtgcacccaggccagcctttcagtggattcctattctcatttagtaattgaatggtatattacattatatgtaagtgcatacatataaggtggaatttttctcaatataaaaaaagaaagaaagaaagaaagaaagaaagaaagaaagaaagagaaaaagaaagaaagaaatgtaagaaagagaaagaaatccttttgttttcctgtgagctcgctccttggggaggactacagggctccccatgtaaaatggctgttgactcctctagcacaatggcctccaaggtctggcctgctcctcggattccctttgaagtgagaggtcattgtcttttgagaatggatttaagttttgaaaatagcccacattgttccagcacaagggaacgaacatagggcaactagtcagaatcagaacccctggggatcgctttcacctggaaattccacttagaagaaaagttggtcctaaacaaactagcctggagttcggaggcatattccagcaaaggattctaaggcattcagataagaaatgctcctcctcccatcttgtacagtcccagcagtcctgtgcagattctagaagaccccgctacttctacccagaattgcagtctattctgggg

SEQ ID NO: 2523 - DNA, 753 bp, Mus musculus
cggctcgagcacacacacacacacactagaaggaagtaaggcaacaattttgagaatatattgtaacatatttaaagcttatggaatctctggtatgagcctaataagttagtatttctttgggagcagtggtgggcacatctgcctgtgtggggagacaggacaatatgtgagtggcctctgggtttggtctttgaaacacatatttttctgggaattataccacattagctgctagccctttaggactcggggagttcttgtggagtctgtgggtaactggatattcgactgtttcagatagtaacattgactggatgtttcttgcttggatacactggtggttacctggagctgagatggccttccagaacacctgtgttcatctggtttttctctgcttgtgtacctcacttcttcaaggcctacactttgctcaatcattgtataaacatactaaactcagatcctgaagaccaatgacacagatggactttgagaacactaagcaatatgtaaggagatgtacccttccaatccccgctggtctcctccacctttggggcatctggctattctctacactaaactcccacagtgctcttggcgtccaggacctcagctgggccagatatagtgcctgagtttatttctcagtgcttatgtttgagtctctagagactaaagtctggaggagaaccctcagagactttcttctcaccacaagaactcgtgaaaggacgtgaactcacc

SEQ ID NO: 2524 - DNA, 736 bp, Mus musculus
gaatgtaacccgttctgtcttcaatgacaggatttgcttgtgttgtaaaaacactttaacacaaggtgcttccggtgcctgggctgtgcctgggtgattgtatttcttttacactactgcgtctttatcctaagtcccactctgtatcctctgacctaggttgtgagaccaactttggaatgaatctagccagtgaattacttctatgtttgatttcctttttagattaactctgataatcactagattgaaatgatgaaaaacttacactgcaaatggcagtggtagtaaatctttcattggttttgcgctgcttgctctagacaggtcatcagcacttaacctttcctgtttactacaaaagctgataaagtaaaaacagtattcctcagcttctcctctgtcccttctgtcctttacccaactgactttatccaatgccttagccaaggagtgcagcacctgtcgcccttgctagcagctgtcctcagagacgctagttctttagcccaggtatagtagtttccagtggtcttattgcctgtttctttcccgagtgttcttctggcttcccagagccctttgggttttgagagtcagacaagaaacaaaacaagggagtgaataatcctcaggaaacaaaggaccattgtggcttccgaatacttttttctcttttctttcctttactttccttttctttctttctttctttctttctttttttttttaaatt

SEQ ID NO: 2525 - DNA, 765 bp, Mus musculus
  misc_feature (725)..(725): n is a, c, g, or t
ggcggtggcggcgcggctcgatggagcatcataaagacatctgcctcactgtcaccaccagcaccatccaggtggagcacctggccagctcttagagatccgtactgccatccatcggaacggggagaagtcctggtccctcctttgtcaactcttcttggtgggaaagttctcttcttccttgacaagtcctgtctccagctccttgggtctcaggcatggctttccttcgcaagataaccatccttattctcagctgctcctgattggccaaggaatcctgagctgatagtgttatccaacagcccccatccaggcagagcttttaaaactggggcttggtgcttgagagaaggatccgctgggagctcacacatcttatccagtgtggggcgcttacctttctctctcttcatcctcaaagttgaggttgatggaagactagtggctggccctcccagataacagagaaggaagctctaaatgccaccagccttccgttctatgcttacctgtaaaagaacagattttgcacgtggctgacccctgtgagccattttcttccccttccgtggtctcactttatattgggtgatgactatacctttttatttgtaagggggcatagctgattcatggttgccaaggtgccagagattccccggtgaccaagggtggcttaagagtatgagttatttttccttaacagctccttccttctctgncaaccaagggcctatatactcagtctcgctatccagtcca

SEQ ID NO: 2526 - DNA, 842 bp, Mus musculus
gcggtggcggcgcggctcgtggcagttgtctctggggaagggacttcccctcccagcttcactccagcagaatcttcctggtctccaactgttctttcctccacgaggagtttctgttctctgatactaaaactcaagagatctttacggagcaggaaactacttagtccctgagaagccaggtgctctaggaagctttgcttgggcagtgctttgagcttgccgctctttgtacttttattccggtcttcgtctctccgccttccccttgcccttgcggaggcctcagctcagcacagctacagtcagtgttcagggcagttcccaggccttgacagagctctcagggaggaacaaggtaaatgctctagcatcctcttgcctggcccatttaattttatcctttagttacctgggccagtagctttgaattatcccttcattgctccaaacccgatgcctgaagcagcaaaatagggcactgataagagggagcacctctctcatctcagagtttccagcttaagggccagctcctagaaagcagtcttcttaaagggacctacatgcatttgcgtttagctgaagtctccaggaatggaggtcctttctgccctcctttccattctgctggcttcagcacactgctgctccttcaccagttggatgggttgctttaacttctttttggaggagcagcagtgtggctgaatacttagcgccagcgggagggagaacgcttctttagtcctccgtcttggattcttcttcctctaacctcagatatctgccaggctcctttccctggatagcagcagttctttctcaagcagtaactgagg

SEQ ID NO: 2527 - DNA, 809 bp, Mus musculus
ggcggtggcggcgccggctagagggcaaggcatattcaggaaggctcctgctgctcactggtaggagaattctggagagtgtcatctcacatatagagttggatgacctggggtggcctggtcctgatgctggctgatgactgctgcacgaggggttcttcctagctagaggccatctgtgatgctctgtgggctggaggcaaggaggatgtggtaggttctagtggctgttacacaaggtctggcacaccgtgagcacaacttcacacagacacactgagtcatgcaaggcaggtgtcgacaccctgcagagtctgcctcacctccaagaattcagagggcacttttggatggatatgggaacccttgtttattccttgtgagcacaggtccaataataggagatgagatctgtcactctgtggttcattccataaatgcttcagatccaacttcaagtgccacattctgtcactaaacaattatccaatcaacacatcattatctaatgactaagacatttgggtttttaaggtttctgaccagtttaatccattctgttccacacataccagatctgttcagtagcttataaaacaaaaattactccactagaggctgtgcttaattcaaatcaatgtgtgttcctgcgcatgtgtgtgtgcatgtgggtagacatgtgcatgcatgtctaataagacataaaattattctccctggggttaagattactcactgaagaaaaataaatacatttgaatatagtgagcctgtcacttgggacacttgatatcctataagctgaggca

SEQ ID NO: 2528 - DNA, 682 bp, Mus musculus
cggtggcggcgcggctcgtaggcggtcgaggttctgccttctctgttcctcgtgtcaccagcactttgatggctgactggacctgatcatgagtatttgtagggttagagagggtgacccataattgaaagtcccctgctgtgtttcagcgctgtagtgctgtggtgtgtaccccccccccccttttcctttgcggtactgaaaggattgaaagaagagggtcatggcattgtcatgctttgggggagaatttacttctcacatggaaactgcacttttttttttctaaatccttggcatttggatgtccatttagtgtacagccctacagagaatgggctggcccaggtagcttgggccccttgactcaacttcactggggaacttgactctgcagttgtgaatcagggaagccatgctgtctccaggtgtggagtgaagctgaccttgggctcattatttccaaatgccctgtcaggtctgtctaggatgtgctgacttcggggtgctatacagaggggcctgtccgtggcaatagttctgtgcaccacctctctgcctcctcagttggttaggaaccattgtagagggtggtgaggggtccaatcccatgcagcgcctatgccctgcctcatctgccagaaagcatgaggaaaggacttgcccctaaagtagtcctgta

SEQ ID NO: 2529 - DNA, 814 bp, Mus musculus
actccacgcggtggcggcgcggctcgagcattcctgtttccaaaaaaggtggggggatggaagaatagtcaaaagactcttcatggtctcataaacagcagtctcaccctgttacgatcccgctgcctttcacttcaagaaaagccacaccactcgctcctttgaaattcctccgctgtgcgcctggtcccccccttttcctgcctggccacgtggcgagttcctggccacggataagtgtcagcgcggtggctgcctcgcccgtggtgttgcctgcccggatttctccaggcagacactctttccattacccaggttctcactgtcttttgtaaatacctccgtggaggcagtttactgtattgttaaaaaaaaatgttttgcatgtctgtttctagtgttacactgtaatccacatcaaagctgagctggtgtccttccatcttcaagccctcaggggcctcgagcaatgcctgaaatgtgcttgttaataagtatttgttgagtgaatttgcgagcgcacaaagactcgtgcagttagaaaacacgttttaccaagatagagagttgcctggtggcttccaggattttttttctctctctagaaagcattatataatctctttgaatgtaatattatttaaattttaaaaataacacaagtttaatatagatcttcataaatgattgcaaaagatagcagaagctttgtgatctttcaaatgataatagagttcaagataaatattttgcactatttccatagtgaatgctatgaggaaatgtacagcaataaaatttgatgctttcaaaa

SEQ ID NO: 2530 - DNA, 798 bp, Mus musculus
cgcggggcggcgcggctcgagcagcctggtttggagcttgcagacgtaactgaatataatttcctccatttgcagcatgggttcccatgccattggcgcaccagacagaaaagggagagagaaaagacaggaactgatgagatagtttgaaagctgaaggagttctgagtttgtttagttctttattccatctctgtgcggcctcccgagcctacgttcgttccctcctcccttatggtgttggcctcctgcctgctgtcatgtgtccccccttttgctccccctccccatcctgatgctttcatgttggttcctgacacatggtctggctttgggtttgaagggcaagggtggctgtgaaccacccccacccagccgtcaggcccgcttcgtcgtcatctctatctccctgctccctggccctgagggtttggaatctgaccgggtgaaggcaccaccggcgagcttttgaaagcaacagggcctagcctgcaaacagttatcttgggaaactgtccagccacgtttccattactcggagctctcggttaccttcagacatggtgccgtgttgggagcaacctcagtgggtttgcactacactcactccgtgctgcaagtccagggatactgtctgtggccactgaagtctcaggtgcagatgggttctcccggaaacccagggttggatccataaggctttaatctggccctgaaagcagtgttgccgcttcagacagtactgcgagcaatggctgccttgtcggagtgagtgtgtagctggacaccttagaggac

SEQ ID NO: 2531 - DNA, 822 bp, Mus musculus
gggcgggctcgagggcctacaagtcgctttcttgcaggctgctcttttatatgggtctcttggcccaactgcttccttctagttaataaggagacctgacgcacacagccagtggattcccctccacctcgggaggggacaggctcccacatcccatcccaccctccacaccccaaagagaaatcccttcaaaacagttggggcctgtagccaggtgggaggggcttgtgccccacagcctcacaacccttggggtcagtgcaccaagatcaagttggttggttgtcttgtgttttttatttgttttattttcttaaacaatcatcaatgagattgtctttgggccccagccttggccacgaggcctgaggccaaggctggggccctggtgagcataggataggtagggtgagtacagtgtggcagtgttgggtcccgaagccctttgaaaacccccttttgtaaaagccaggcttggtagtgggcacctgtcatcccagcactcaggaggcagggtcaggaggattacaggttcaaagccagtctggtctatattagaaaaaagaaaactgtcctttgctaaagaaaaattaaatgaattttttaaggtgaaatctgtgggtaagatggagtctggagctttcctcttggaaccagttaaccgaagaccctcatgggccaggacatccgtttgactccccactcaccatcaggccacacttttaaagaaaaactgttctctaaccaggattgtaacaaatgtgtaaatagtattctgaagttgaaagtcgatggtgcaatatgtatatacgtactgatttt

SEQ ID NO: 2532 - DNA, 363 bp, Mus musculus
gctcacgcggtggcggcgcggctcgaggcaagcggagctgtcctctcaggaccaggcgggggcggggcttcgatcaggccgccccggcctagcccgcaccgtccgcaccgccggagagtgcgctccccggctgggacatctgttgagcgtcacaggactctgacgtcacggtcgcgtgtctgtccgcgcgcgcttgggaggaggtgggggggcctgagaagcagcagcactctcaactgcgggcgacgggatatccccgcccgggcagcgcgccggcaccttggctctagactgcttactgcccgggccgccttcagtaacagtctccagtcacggccaccgacgcctggccccgacccagga

SEQ ID NO: 2533 - DNA, 539 bp, Mus musculus
gcggtggcggcgcggtcgaggcggtcgagtaatttttaaatatctgatcattttatattgtcgatcatttcagcacctccaaagggtcctaggatattctgcctctctcttcaccctgtccccagacgggggaacccgtgggtcaggcgtggataagcctgcgagaatacaccctttctccattcactttctatttacaaattaggaaagcaacctttcagtttatatatatattttttttcctttttgatacctcagtgctgcaagtatcatcagagaggctatggaagagtttgtgtttgtttggttgttttttttaatttatggtagatgtaaacagaattttaaaaataaaatataaacatcactgcactgtgactggtggggaaaactgacagcttccgtgttggtacacatttgacatgggctgttataatatatggtcctcagtgggggaagacacttagaatgaaggatgttttttaatttaacttttttttttattttttttaaggaaaattttcggaaatgggtgggaa

SEQ ID NO: 2534 - DNA, 715 bp, Mus musculus
gcggtggcggcgcggctcgagctctgtgccgctctctcctgcctcggctcttccagaactcagtcaccagagagactctgctttcggagtagaggggttcacccaccttccttgaattcctctctgtctcgtttgtttatacttgatccttttttcagacctcctttgagtttgaagggaagctcgttttaacaattatctttaggcctttgaagagcagcaggtatgctttcccgcctaatctgctgggcagattgtgtgcctgcctgccgagttgggcccggaagcatggggcagggttctcctggctccactttcttggagaaataaatgatatagaacatctatctgccttgggcttctactccaatgactgcgtgagtgtcttcaccctggacactgcagccaacggatggggctgggggtgggggagaggggtggcatgtccctaacatgctaagtcactgctctgagcagtttccagcgaacacgattcatttaggtatgcccgtccttgttcagggtggaagaagtgggaattccagaggtctccgtctgtaactcctctggctcccagtggctacaaggatctcatcacgtgccctactgtgatgtgggttctcccttccccatagctgcggtggcaaggtgggtgcctcgctcttgcagctggacccactgcagtactggaccgctcaatatcgaagaacctcca

SEQ ID NO: 2535 - DNA, 805 bp, Mus musculus
cgcggtcgaggggaatagttggctgaatcttgatcttgttgttgtcaagctattgaacaatggtcatagcagaacaaatctcatctttttccttacaaattatggaaaatatatagctgttgacagcaaccaagtttttagagtagatatcacacacccctcaggactccattttccagaaatggtcagaaaggcgagtacattgaggtacttcataagccttggctttataacttttagaattttgcctataaatgtttgacaatgtacataattaagagaaaagattttaaccttagagaggggtggtagttgtaccttgctataaggctcttcaactccaagaaatccagtacaatttattctggtttaggtttcattctggcatacatgtatgccccatagggcgaaagcctgaacaatgtcaactactttatacatccttaagtcacttcttaaataaataatcctgatatattatatattcctgattcagttgtataggaccactgaactctaaaatatatcactttgatagaataatatagaaaggctgacgttttccttcatctgcaggcacatcagggaatatgcacattgctgttgtgacttgaggtgactgtttcttgccctgcagtttctagtagacatacctcattgtctcacatagccaaacaaaggacgcatctgactccaaggaggacatcttgtataaagaggaaggcatcgactttttctgttctgaattcgtgcactgaggctgtctgtcctgtgaaccgtgaggtcaagctgttctctgaatgta

SEQ ID NO: 2536 - DNA, 748 bp, Mus musculus
cgcggtggcggcgcggtcgagagctcaggaacaaaggaatccgtgaaaacatttttttttttcttttatgaattactcttgggtcacttctgccactgggaaagccagaacttctccaaccagaaccttgcaaaagtccagtgaaccagtcgaatcattctgagaatgccaaagaatctttggaccataatacacagcacagcccggacctgacaactgtcgacttgaacttcctcttcaaaggaatgggttagcaacaaagttcagagactcggttatggcacacacctacagagaaagggcccaaggcctcagaggaggccgccgctgctgctgctgctgtgggtttacggtccctgggctgagccgctgtgagtgtggtcctaaactttgaggactccctcccccttttgagggggggagaaccctgactgtgaatccagcgtggttcccccattgccaccacttagatacacaaagagcaaaacacacgggaccttgggtggtcctttaagccgcttcctgctgccttctcccaaggatgcacgcttgtgctccatccaaatcattgggggatggtggtggggaaggtgatatgaatgtcacaggaggagacaccttctgtcttggtttcaaagaaagtgatgtgccattggtcaatatacaagagaaatattgaaaacaatatatcgaaaagagcaattttaaattatttagggcttatgtggcaatatttatttcctggtat

SEQ ID NO: 2537 - DNA, 784 bp, Mus musculus
cgcggtcgaggaaaactacataaagttatatccacatgtaatttttttgaggagatcgataagagtagtaggcaccacatgtaagtcagggtcaaatacttggatatttatctgcatatgcaaattaaaataattagaaactttctacctagtacgtcatgttgtactaggtacatgatgctggtcagccatccttaatccaaaattttgagtcaagtcttataagtggaaaattccagtgaacatttattttgtatataaaattttaaacctatgtgtgaagctaccctcaggctatgtagatcagatgtataaaaagcacaaatgaatatctcaattacatttgggttccattctcaagatattttattatgtatattcaattcaaatattctaatgtctagaaaaatgaaaacctggatattctggtcctgagttgttcagatgagggagagccaacctatagtttaacagcttaggtaagactcactctgcccatgctggccaggggaaccctcaggggactcctctgggtgaagggcagatgctagcactgcctgttcttagttctccttccattcctgtcctgaagttctaactgccgagccttaccttcatagaaggtcttcactgccagagtgggcatcttgcatagtaagggattccagattagatatgagttgagcaccctgctttcttcctatcaccccgcttctgctgatagtccgtgctacattaagggactgagcagagaacactcagtcaagtcctgatccatttcgtc

SEQ ID NO: 2538 - DNA, 829 bp, Mus musculus
gcggtggcggcgcggctcgaggcggctcgaggaatccctggtgaaacaggacagcaagcagatccaggtggaccttcaagacctgggctacgagacttgtggccgaagtgagaatgaagctgaacgtgaggagaccaccagccccgagtgtgaggaacacaataacctgaggcccgtggtgctcatggaggggctgtgctctgagcaggggtacctggaccctgtcttggtcagcccacctgcgaagaagcccttggagaacaagccgggaaagcaagaggagttccgtgcacatggaactccggacgacagctctctcctgaggaaggacatccgagacctgaaagcccagctacagaatgccaacaaggtcattcagaacctgaggagccgggtccggtccctgtctgccacaagcgactactcatcaagtctggagagaccacgcaagctgagagccgtggcgacccttgagggggcttcaccccacagcgtgactgatgaagatgaggggtggctgtcagatggcactggggctttttaccctccaggactccaggccaaaaaagatctagagagtctcatccagcgagtatcccaactggaggcccagctccccaaaactggactagaagggaagctggccgaggagctgaggtgtgcctcgtggcctggaaaatatgattccttgattcaggatcaggcccgagaactatcatatctgcgtcaaaagatacgagaagggagggggatatgttatcttctcacccaaaatgcaaaagatactgtaaaatcttttgaggaactccttaggagcaacgacattgac

SEQ ID NO: 2539 - DNA, 624 bp, Mus musculus
ctcacctcctagggcattctaggtgaggagctgaagctcagggcattgtcaatcatggcacaggggaaaagaatgccaactagtgttttattcagtccaagtgtggcctgggagaccccactggcctcaggttccccatgtgtgaagggctagtaccaggctctgccccaatcacagggactactgaaagggatatgagggtgaagagaggccggatgaggcagcagcctgtgtgaggggatagggtcttagcctgagttgctgacccacatagcccacaacaaatgacagtgcaggatatcctgtcttacgtgggtatctctgcgcagtgttaggtccagtcataggtgctgcggggctgcctcttccgaccggtgggagttgatgtgtgtcctgggtgtggtgtcgaggggtggctggggcgccctcaggcctgtgaccctctgtgaagtgatgatttgtgtggcacattcattcctggaccacgtccaggtcaacctgtcgtacctgtggctgcccttgtcccgtgaagtcattatagtttattcagctgcaacaggacaaatgagcaaaagaaccttgaacgagaggtcattaaaggccttttgtgatggagcacaaaaa

SEQ ID NO: 2540 - DNA, 757 bp, Mus musculus
gcggtggcggcgcggctcgaggggacaacaaaattattctctttatgtggaatcagacaattccaggatacatttgttttcatttcccacaaattgcagtgaaagagaataagatactgtactaatcaactttatatacatttgtcagtattcccttacatatgtctgtatcttttataaatagaactgtttgtggaaatgtactgtttcagcaggggccactacgcaagcgttccttctgaaaaatgcagtaaatagaattccatagctgggtagcgggctgctgtagaagcgagttctatgatcctggggttcatggccatagtataagagatatgcagttagttttggaggtagtttgtagccttacatcttgacttgcaaagtacggtgtagagacctactgtgtgctttgccagttgagttgaaacaaagttgtctcagagtcggggttttggaaagcgggaaacaaatgtctgtgggcagtcagttgttcactgtaactcatgaaacaggtatgctggctcgagccttaggtcagaactgcttttaaagattgaatttgacatggggcttgcccatgaggaagatgaaattcctttacctttagggcaatctcattgtggactgctttatttatgattagtaacgctgttttaagtgttaacccttttatcgtattttatttataaaaatggtttatatattgagatatataaatataaatataaatctatatctaattgctttataaaaa

SEQ ID NO: 2541 - DNA, 630 bp, Mus musculus
ataacatagctgcaggtcttggtcccaggactgtgccttaactataaccaagtacttgtcttctgttttgctggcaattcaaagttaggtggtagtgaggctcgggctgggcgtgttggagccgtgctcctcattgattggattgcaaaactatagatcacggctggagaaccttcatgacccttgtgagacaaaacctctgacatacatgttgccacggagcacaatggcactggtggtgcgtatttaccagctgagtgccgggagctactacacctggatacacaggattggttttcttcttcccaaacgcacacaccaagaaaacattcttctctagggactggagaatggccttctggcttctggtcctcacaggaagatgaatttgatttgaaatgggagccatagttcactgatctcgtcagtcctgtgttcaccggcttcctgccatgccaagacattacactattttacaatactctcctcgtctccaagactaaccaaatttagaaatatgtatgatacatagtccatatgtgtcatacatatgcatacaaacacgtgcacagatatgtacacgtcagtcacctgcgtaaacaccagttatatgatggatgccaattcatg

SEQ ID NO: 2542 - DNA, 635 bp, Mus musculus
aggcagaaatagatttttttttattaaattaaaatttattattttttgagacaggctctgtgtgtgctgccatatggttactgagaatgggactcaggacctctggaacaagagccagtgttcttacctgctgagccatctctgtagccccaataacatatattttaaaaaaaaatttcttgaaaatgtttctaggcttgatgttttctagcattgaggcgccagaccctgagttcaaggccgtctggtaagttccaaggtcatgagttagttccaggtcatcaaaggccttgtctcagaaaagacaaacaaaaaagttggttgaaggaaataaacctgtgtagatactataactatgcattataactatgcatgaaagtgcttttatttggagagacaaggtttaatttatatatatatatatatagctaaaccaatctcaaatggcccaacttctggcctctcaaagtaccagtgtgttaaccttgtagcttgactgattattggggcacagtatttggctttttttaaattcttgaaattatggtcttagttaaggtaatctcatcctccgtgtgtagtacgtactacagttggtagtaccagtagagcaggcctaataatggatcatttaa

SEQ ID NO: 2543 - DNA, 871 bp, Mus musculus
cgcggtggcggcgcggctcgatctcgagccgcctcgagccgccggcagcagtcagtgcagagacccacaattggtcaaagtgctgggactaagagtctgtgaatgcttgtcctacacaggacacctttatcacatgccatatcaacactccctaagtgttgaggaacatcaccaaagagcaactagagagaatgctacgaaatgcagtctctggcctgtgatgtggctattgcacatgcgtagtagctgcagttacctgcacaagatggagctggtgcatagcgtggatgtgggtggtgctctctagaccccacccctaaactgaggagctattggcagttggtagctactgggaaggatggatcattctaactactagtttttttctcaccctccagtggaccaccccatgccgtgcacatatgggcagctcccgctggacttggattattaatgaagatgggaagctgcaagaggggaccattgggaggcttctaggggaagttcaaggccaaaatgaggggtgggtatgggttcattgtatatatgaatgatttttcttacagagtaaacataaacttaaaataataggtggaggtaagagttattacgatctcatcacttaaaattgaccttaaaacctttgccatattcccaggaacaaaagcagacaagattgtcacatcctataatgtaagtgcctgtttacatttggacatttaatcatcatcataatcattttagagattcttatcttcccattggaagtacaaagacatagttcctgtctgctgatggcacagagctcagaaaagggagagagaaaacattttagacactcaacaaatcccttctaatcacaaagtcctga

SEQ ID NO: 2544 - DNA, 421 bp, Mus musculus
atcgatatagctatcgatacgtcgactcgaggggggccggtaccagctttgttcctttagtgagggttaatgcgcgcttggcgtaatcatggtcatagctgtttcctgtgtgaaatgttatccgctcacaattccacacaacatacgagcagggagctaagtgtagcctggggtgctaatgagtgagctaactcacattaattgcgttgcgctcactgcccgctttccagtcgggaaacctgtcgtgccagctgcattaatgaatcggccaacgcgcggggagaggcggtttgcgtattgggcgctcttccggcttcctcgctcactgactcgctgcgctcggtcgttcggctgcggcgagcggtatcagctcactcaaaggcggtaatacggttatccacagaatcaggggataacgcag

SEQ ID NO: 2545 - DNA, 760 bp, Mus musculus
gcggcgcggtcgaggagccaccgtgtggttgctgggtttgaactcaagacctacaaaagagcagtcagtgctcttaaccgatgagcaatctctccagcccattcaaacatgtttatgtcagtccaagatattacagttaacttaaaaggcacttgtcagtctgctctccaggaaaaacattgtatagaatatcagaattatagtaataacctatcatatttaaacgagctgagccaggctggtctttggtgacgagtcacaagttgctgtttattctgtctccctgctgaagaattcttacatctcctagggcaactgcagttgggcagccaccaccaccccctgcccacccccaggagatcaaagctcccaggcatccacgagcgtcctcctgatgcccagaaacttccccctacacagaagtccgattccccgacttccgtctcctcactgagaacaccagcatctaaaattgacctcttgcccaccaactctcagctcaactcactgccgtagtgggcaggtgccagctaagaactgactttggatttatagagcactgagtatgtccctgctcacgggaggaattccctttggcacgatctgaatgccagctttatttttagcaaagcaggatgatcactcctctgagatcagaacgacagggggtgcgtgtattagttcggatgtatcggttgaggtaccagagtgaagctagtaacttacaaaagtcaaggtcttaagagatagcccaagtgct

SEQ ID NO: 2546 - DNA, 680 bp, Mus musculus
gcggggcggcgcggctcgaggcgatatagaactttgaaatcagcctcgttcgtcgtgttgtgacaatagaaatgtgtccatgtgctcaaagtctcttgctattccctgtggaatttttcagtgatgtaatgcttgtagccaaatgcttaaagagtgtttatatatttttttccttataaatcatctattttttgacaaagaaaaaacctatttaactgcaaactgaagagagggtaaagccgaactgccagcatttgttcaaacattaataccattaagtggtcctctgatgcctttccaagcctatcatcaggaaggaatcaataatcaactgctatatttaaaccaagttaaaggatctagctcatcagaatacaggacctaggaagttcttcctaagccattgaaggttctaccttggggtctatatctgaaaactttacaggaattttttaaaacataaagtcatttgcctcaagttggagaatgtgggacctgaataagttagctttaaatacatcattagaatcttccacacagtcaatgtattagattctcatttgctcctttacagtgcccacactgactttagagaatcaagattccaagagaacagtagtggtgccccagggcagggaattaagagaaacggagccctcccaagcagcttctggcaagaa

SEQ ID NO: 2547 - DNA, 691 bp, Mus musculus
cggcgcggctcgagtcagctctgaatgtgagtctgcccctcagggaaaccccgagctagacaatgtggaaaataaagccaaaaacatcaaaaaaacaaaagagaaggagaagaaaaaaggaaagggcaagctgaaagtcaaggaaaaaaagctgaaggaggaacattaggacgcagagaggaaaatgaagaggaagggcttcggtgccatgctgagattaggaaagaagaaagatgataaggtcggaaaggctgagcagaaaggtgcgcagaagtccggccacccggaggaagaggagctggaaagaatgaaagaagagacgagagaggattggagcaaaacatcaggagctgagagaaaagcaggcaagaggccttgttgattatgccacggcagtgactggaccagtgcacgatatggacgatgacgaaatggaccccaattatgccagagtgaaccactttcgggaaccatgtgcatcagcaaatgtctttagatctccatctccccttcgagctggaccacttgcttaccctcgggatgggcgtccactgtctccagaccacttagagggtctctatgccaaggtcaacaagccatatcatccaccagccctagctgacagtggccgacccatggctggaaccacggaacgcatcagaagctacggaaggagtattaccaggctcgg

SEQ ID NO: 2548 - DNA, 810 bp, Mus musculus
gaggaatctttctgtaaaagtaaggaaggtccttaggtcatctggataagcttcaggtctcatgtcacctggatgctactggctctatgggatgcagaatgaggaagtggggagggacatgcttagatgggcatgtcactagcagtgccattgtacgtcatgaatctgccatccacacttacagtttctctgtaccccacattcccacctcattctgtttgcagcgtcagacactgtttcttgtggctgatgctgctcagctcttctcttggttcctccaaagcttcttggaagtgcttcccccagcttctcgaatcgaaggcttctcagtttccaggtccctggttcaatgccacttcctcccagaggtgactgtagcactccacggcttgttaattcttgaaactgtcagactttaattttcagaaagcctgtgcaaagtaggatcttattgtctaaagcgaatttccttcgagtaaatgaatgcatgccttatatgttctctgccagatgatgttgtagttgggttcctgttttacaaggcacatacctttgtttattattctacttggatatgaaacactaaactttgtgagttatacctctctttaaaatgtggataatttgtaaaagcctgttgctagccagaacaacactgaatggactcagtagcttatgaacacatgcacacacagaaaaaaacacacacaaatgtatattagtatgttaaaccatataagatgtgtgtgtgagtgtatgttgatgtatgtataaaaaatgccatgaaaaagtcatgaatttgtgagggag

SEQ ID NO: 2549 - DNA, 779 bp, Mus musculus
  misc_feature (282)..(282): n is a, c, g, or t
acgcggggcggcgcggcttcgattccaaactgctatcccccttttttatgttaaaagccgtgaatgctagcagcaaagtggcaatttaaaactgaacgaaaggaagcagcagttctacaacataaaaggctgggagcgggatggctttaaaaccggagggaaaatgagaaactgctaggacaacctggccggcgcccagctgtgcaacaggcacttcgcgttaaatcgactgcgtcttcggctggtttctgcctccagacccgctttacggtgctttctttntgccccaaaagaggagacaagctgaactcctgactttaagaatgtgtggaagtaaggcattaccggaaggaactcttggtagctggggatgcattcggatgatttcttataactatctttattttgacatcttaaaaaaaaatctggccagtcacttcttactgtccttcatttaagggctattaaccacctctgaccgctgggtcctatgaatctttggcatgaaccttcggaaagttttcaagcggagatggggcgaacttgattggaactgtgtaaaaagaagacagatgtgtgtttttttcacactgacaacgtggccaggggccaagtgatcctggactggtcatggtctgtcgacccgggttcctttgtcgccggcgattttagccccgaactttcctggtgggtaaggtggtggcgatctgtctcttttaccagaccctgacactccgagggactaagaagatcgcagcggacgtctctggcactgtccc

SEQ ID NO: 2550 - DNA, 349 bp, Mus musculus
ggcagtgcccatctccatcccacaaggttcagcgcagcgtctctgccaaccccaagcaacgacgctccagtgaccaggccgtccctgccattcccacctcgaattcctactctaagaagactcagagtaacaacgcagaaaataagcggcctgaggaagagacagggcggaaagccagcagcaccgccaaagtgcctgccagccctctgcctggcctggacaggaagaagaccactcctgccccctccacgaacagcgtcctttccaccagcacaaaccgaagcaggaactccccactttggacagggccagcctggccaggcctccatccagaatggtaaagacagca

SEQ ID NO: 2551 - DNA, 690 bp, Mus musculus
gctttgttccctttatgagggttaatgcgcgctggcgtaatcatggtcatagctgtttcctgtgtgaaatgttatccgctcacaattccacacaacatacgagcagggagcataaagtgtaaagcctggggtgcctaatgagtgagctaactcacattaattgcgttgcgctcactgcccgctttccagtcgggaaacctgtcgtgccagctgcattaatgaatcggccaacgcgcggggagaggcggtttgcgtatgggcgctcttccgcttcctcgctcactgactcgctgcgctcggtcgttcggctgcggcgagcggtatcagctcactcaaaggcggtaatacggttatccacagaatcacgggataacgcaggaaagaacatgtgagcaaaaggccagcaaaaggccaggaaccgtaaaaaggccgcgtgctggcgtttttccataggctccgcccccctgacgagcatcacaaaaatcgacgctcaagtcagaggtggcgaaacccgacaggactataaagataccaggcgtttccccctggaagctccctcgtgcgctctcctgttccgaccctgccgtttaccggatacctgtccgctttctcccttcgggaagcgtggcgcttttctcatagctcacgctgtaggtatctcagttcggtgtaggtcgtcgctccaagctg

SEQ ID NO: 2552 - DNA, 758 bp, Mus musculus
accgcggtggcggcgcggctcgagtcacttgctaggcgaacataaggaactgaattcaggtccctagaatgcatgtaaagctggacacatccacacatgactgcaatcccagaatacttatgatgagctgggaggctaaaacaggagaatccgcagaaacccgtggaccagctaggccagcctagactatggcaatgatgctctatctcaaacaaggtgggaggtgaggacccacatctgaggttctacgatttccctgagccatgtttttggtaccccacagccagtcatttgtttatggctaccgccttgcaaaatgccttctctctgggtcaaaaaccaatgtacataaatgatttccctgataattctaaagtgttacctaagtccagctctgattctaatgtatatagaaaaatgccttaagcctttgagtctaagaaatgaaacttgtgtacctgctgctgctggtgtgtgtgtgtgcgcgtgtgtgcacatgcatgctctgaggctgtgtgtggctgctctcttgtacacatacacacactctgagcagtgaggagcttgccaggaccggacgtggaccactcctaaacttcatattgagttcccttaaaagcaggaagtaccccttcctttttaaaggggagtgtcaacactggcaggactcttttcttgagttgattcatagtcttttaagtcaattcctgggtaggacgtgagtcctacgtacacacatggtttttctttttccagaa

SEQ ID NO: 2553 - DNA, 601 bp, Mus musculus
acgcggggcggcgcggctcgaggtgcactgagtcagagataactctggagtctatgctgtccttcccctgtgtctgccaggagccagtccaactggttagccttggtgccaagtccccgtactacccgagacatctcaactgtgctgtgctgggtactgttaggcattggatacttgccatctgccccattcctgtcttcgcgcagtccctcatggctggaagctccacgccctctatggaaacggacagtggcaggtgtttgttgttctgccactgggagccaaggtgatctaagctgggaaagccatgccagacatgtgaattaggaatgagcgctgcagaggaagccagccctggctaggctttccactcatggcagctggagcagatcctgttttctaaagatggcagaaacaatttctcaccccacaagaccgtctataatcagatcttgacattccctgcatgaggaagtgggtagtgaagccttggctcagtagagcatttgtctagaatcctctggtgaggggtgaggcatggctcagtggtagagtcccagaccttcactgggggattctagacagggactctccccactga

SEQ ID NO: 2554 - DNA, 767 bp, Mus musculus
  misc_feature (632)..(632): n is a, c, g, or t
gtcgaggaaaggaaaaaaaatgccactgctctgcaatgcaaagttttcagaattcttgtaaatcgtgaatccttggtgtcacttctttagggtgaaaaatgtttctagtcaagctgtatgggaacatcctgcttattttaaatgtcttatatatttaaagtatggtcagtattatccctttacacataccttgggcaaggtggtcccctcagccttaggatggatggcttcatggcacagccgatctcattcacagagagcccggtgtatgtccattcagatgtgtagatggggccagtgaagggtgatctagatggctgatgagccagcttcatggtgtagggtaacggacgattccctgtgccatgagaatttcactagaatgtcactaaacagcccaactacctcatgtgaaattggctgtggacaatctgtgtttgatgagaaatgtgttcgcagaaatttattctgtttgataagttgaacagtgcagtgtctctatgaagaagaaacatgttataccagatgccaaaggctaaactagacatagatttctcagattcatttctatgttaatgttattccagtctgtatcctcataaaggtttgtagttttgtagagccacatgctntgggtatctgtcacaatcacctcttgtcccctcagtatttgactgaacatcataatgctgataggaatcaagttaaactacgaaagtgtcaaacagcttgtggcttcttaatttaatggacctttacttagaaat

SEQ ID NO: 2555 - DNA, 751 bp, Mus musculus
cacacacatacagacacacatacacacacacatacacacacatacaaacacacatttaaaaaggatattgggctaacattttttttcagtgaataaaatgactggaatttaagtgtcagaattatttttacaaaaaatgcaatgttctgaataaaccacaaaggagagagatcttaatctgtgaggccctggattgtaaagtacactcttgtttgtatctaggaagatatgatgggagctgccgactaagttgtggcagtctgtagatggccaactccatttgattctgagacaggaaagttgaaaaaaaaattagattcaaagagatatgttattttaatgattcctcaaaaggatttaggattttttaaagcccatattcaatctcaaatctttacagaaagtctccttctgctgtgctctggaacctttaaagggtcatgttcacggcagggaaatcatgcactatgtacccggtgttttacacccaagaaatgggacatggtagttaggacaaagtctgtggcaagacttctgatgggcatgtcgtaaatgtctgtgccacttcaaaggacaatcacattcttttcctctgtgctatagcttttccaggacttgggacaaatggattaaaataagattgaaaccctgtgcatgggagtgcctgcccgtaatgccagcatgctggaggctgagacagggggatcgtgagtctgagactggcctggatacatagtgagaagccatctca

SEQ ID NO: 2556 - DNA, 826 bp, Mus musculus
catgaggcatgtactcccatcccatacacataacctcaaagccagtgtaacatgacgtctctgagatctcatctaaacctcatgtgtatgaaaagcaatgaggagaactaagggctgctgtgattcctgtcctgtgctcagaaaacaaaggccctgcctgtacagtgtggtgtttgctagtgggaggaggattgaaccaagggccttaggagtgtgagagatgcacatactgagagctcttctcccagtcacagaaggaacactgggggctggagagatggctcggtgttaagatcacatactgttcttgacaggacttgagttcagttcccagcacctgtgccaggtgctcaccactacctgtaactccagctccaggggacctgacacttctgacctgtgggcactagtcctcagggacacagtcacacacacaaaaatgtcataaggacacaggtataatatgggtgtggtgtggtccatgcttgcatctcagcatttgggaagccaaaacaggaggattccatgagtttgaggctggtcatgctccatagaatgagaccctgcctccagaaagaaacattggggctcaaatggtaagattcagagctttgtctgtttgagttgctgggaatgaaaatggtccaggcatgttaggtaagtgtgtcagcgagttgtattacaagcctaggagtaggcagcgtggatcacagttcttttctattgcgtccagccattgggatgtggcatgtgcgttaactatgcaagggagcagatccagtagttgaagctcttgaggtgcacaattgtcagggagagagacttt

SEQ ID NO: 2557 - DNA, 789 bp, Mus musculus
gcgggtcgaggcggtcgagtcatcaccaacgtcataagaatattgttgcttcattctataatgttataaaaagtttattagaagttagtatatgctttctagttgagcaccaggaataaatgtatgctactttctttgcctatgtcacaatagataaagaacagtgaaaatctttattttaaattcagactgaattcatggttttagtaactgttggaattgagaaatgaaaaatttaatgctattattgattgactgatatctgaaaatcccggtgtttatctccataattcaaacaagcatttcacagagtgtttttctaaattagatatagaagatgcttttataggaggctaattcgatactacccttaataattggatacttatatttttataaaatatgtagatcatatatatctcgtttgttcagaaaatgggcactatgatatctcacttctatttatgtgagccaactacccaaatgagtttgtttgaacatttaagataataactataatttataaatttataaggagcacaaaataaataaatgtatatttagttacatatttgaatatatataacatacttaacacatccagaataaatagataacctgttattttgccttcataattacagtattctcactcaggaaatagctactttgaaagggccccacatttttcatacgaagatatttcttcctgtctatgcatattaggctattctaccaatcattaatcccatgatcagtctaaatgatcctctattggtgagcattgga

SEQ ID NO: 2558 - DNA, 808 bp, Mus musculus
gcggggcggcgcggctcgaggtcccagcaaggaaccatcttatagcctgtgtgtggatggagcaagcccacacaagaaaatgggaggtggagaattgagctaacttccaagtgctttatggcttgtcctacatggagagaagttggcctgatgttaaaggcaccagacagatcaattgattgaactactatgtcatctcatcatgtcaccgatcttcttgcttggataccttcctgggtacatctgtgacttctgtaagatgttgccaaccagaacagaagagtttggccctgctcagtgggcttcagtcagctggtgccagcatcttcctcctctctggagggcaactctatacagcatcactggtagaaagcaacagttgcctcaggcccctggctcccctggaccttcatttctgtctcaaatttcttaagaggaaatccaggcccagtttgacatcactccactgagctgcctccagtcttgccatagccaaggaagggaatatgaagaatctgtacaagttgagcccacctcggaaggaagcactctcaactagaatccaggctgagacttggaaccctcctgctcagcaaacatgcttctactgagcaagggagacaccaggccacataaagagcatactggtgggatgcctagagatgtgaccagccagctccggagtaatagcaagcactactttggaagacaattgattcagaaactgagggcagattcaaacttcaaggtcacggcattctaaaaaatttcacagaagtgtttgtcatatgtttcagtctgaccccca

SEQ ID NO: 2559 - DNA, 891 bp, Mus musculus
  misc_feature (748)..(748): n is a, c, g, or t
gcggtggcggcgcggctcgagaggaaagtggtttctgaaatgttgaagcaggataactgtcttcaaaagcatagcggccgccacaagacaggagtgcgttgtacagttcaaggacggacttttcagggcttggggtttgtgggatattttttgttttgttttgtttttgccacaagatcttcagtgtgtttgtttcagggtggaagtgggtgttatatgaagctgtcagatattttaaggaaatcttcctacaacagtaaatgaagacatctgtatatatgtgatatagtgaaacaaaagacatttctggtattcataaagataaaacaaggattttattcttcctgtgtctgtgatttaaactcggtaccatactctggcttttgtatttcaccctaagtttaaaaataaataaacaagatattttttaaagaatgcacaacatagtgtgtcttagcaaggacatgagtcatatgaagcagagtgagtagttgtcactaaggtccttgatgctcactgtaaaaacacaaagagttccatgaatactctagtaccacacagaagtaccacagtggtgctgtgtcacataggaccctgaaggattttctgagagttgattcagcttagatgggagctccctccctgcaactctctgccttcctggtgtcatcagaacttggtttgactcctaggaaggtatcatgagcagactaggacctttctcctctctgaacccagaaaacttgtntatgagaagtgtggtacagcaagctggtctcaccatgtgagtaggtgcaggtttcttactgcacagtatccactcagtcctaatattacctgtgatggagttaggcctcagctgtaagttttgaagcggctgtaaattactgt

SEQ ID NO: 2560 - DNA, 606 bp, Mus musculus
ccaagatcaggcactactgaggctgaaagagcagctgaaacggaccgtccgtctgcaacccagtgatgagcccaggtgagctctgcacttcgggggctctttgttccttgagaggcatggaggactatgctccagtgactgggaaggaagaacatgccagccccacgcgcttcacctagcccacaaggacagcccgtacgcagtgttcacacagcatgtggtctgtggtcattcctggcagccaaggtttgggaaaagcagcctctgcctgggtctgcctctgttctctgctcacagctctccacccctgccaaggagactgtggttgctagcagctgtggacactttcccacaatgcagttcttcgtgatgtctgctaagctgggggggggggggtcttctctgaagccctgattcctcactctgactttcccaccctttcttccttgacttttctcaagggagagaaaggagaatggatacatttatccatctatctatctatctatctatctatctatctatctatctatcgacaactgaagatgggaaaagggtaatttttttaaaaaaagctaatgaccctgtgtatttagttaatgtggg

SEQ ID NO: 2561 - DNA, 319 bp, Mus musculus
ctccacgcggtggcggcgcggctcgagctagttctagatcgcgactggagtttttttttttttttttttggccagatctactttaatttcaaaaggaacttggtattatagtatttacttttatttatatacaagtgcttcacatctgcttttaaaatgcagacccccttataattccgtgggtcccgtgagtgaaattagcgtgttctttaccaatacaaaaaaaaaaaaaaaaaaaaaaaaaaaaaaaaaaaaaaaaaaaaaaaaaaaaaaaaaaccccccaacccccccacaacaccccgcgcacccccggggggg

SEQ ID NO: 2562 - DNA, 767 bp, Mus musculus
  misc_feature (705)..(705): n is a, c, g, or t
ggcgcggctcgagccccagttcttccagctctgcctggaacacgcacagcttctaggctcaatgccttcactatccagccccacgtccccaggctccctcagaataggcctggagcagcttcccaggtgttgttcgcaagcactttagcatttctgtttacatgcgaactgccctagctgttcttaccacgcatcttctcggcacagccatcagggccaggcctcatttccctgctacttctggactgggctctgacatctgcttgtccttggtcttctagagccatccatctctgtggtatcctgcaaagggttccgtttcagcctcaatatggcttggggttggagccaactgcacactgggtggtggatgctcagagccaccctctacaggcctagggcccaggaggtgggcaagcactactccagccagcctggccctaacactcttggtactgccgtcctgccatgggccccatcccccttcctgcctggtctttccctttgcacctggactcaggagtgcctgggccattccaagctgggcctgggtgcctggcctccacatgccttgggctggctctgctctccagctgccccactctcttatggttggacagctagacagagcagcaggggtgagggccttgatgtgtccccaagagacactgcattgagtccaggcacaggccagcaacctctgtnggttcagaggggtccgactgcaacctctactccagtttccccagttggatctggtggtcaca

SEQ ID NO: 2563 - DNA, 168 bp, Mus musculus
tcacgcggtggcggcgcggctcgaggccttaggattatttagcgatcctcaaggaattaaacttagggaatttgggaaatgtagactgcacaggcagtgtactggaaaaggtggaattttttttttttttaatgagggtgtctgaaaattaaaatcaagccggaaaaa

SEQ ID NO: 2564 - DNA, 836 bp, Mus musculus
gcggggcggcgcggctcgaggccttttgtagatagccattttatcagaatctaacacaattatattccttagctttgcatttatttcagtgactagaggtttcataatcatctcagaatcaagcccttcaattttaatttcagaaatgttttgtttctgatcctgaataaaaatctgtagacaagataattctgccaaaagctgcaaggtaataatatcttcattcgtgggtagctttaaagcaagttttttaatgatgtccccttgtcttccggctctgcagcagacaccgaggcagatttttcccttaattccggaagaatattattaagataattcattgtattcagaagtgcttcagtgtgtaaatgaatatccaaagaggaaaaattcaccttaataagttgtaaaacatgttataggtactattcaaatttggtgcatttttttcaaccttcatgaattccaatgttaataaatcttccattgtgttatccaggtcgtgatcaaataaactggtttcttgttttcatctaaatattctggacattttagccataattctttcaaaaaggcacttcctttcaagtcaaatgttctaaactcagcttctgttcccaatcctaaagcacccatttccagcacaggtagttcacagtctcccaccaggtgataaaactgaatggacacctctggctacttcaaatctcatcctaagttgaataagattcatcacacaatctttctttgtaatctttttctgtcgagtaccattttatctcttacatgacacttggaggacactcctccaagggactacatggtgcattcaaaaa

SEQ ID NO: 2565 - DNA, 320 bp, Mus musculus
ggagcataaagtgtaaagcctggggtgcctaactgagtgagctaactcaacattaattgctgttgcgctcactgcccgctttccagtcgggaaacctgtcgtgccagctgcattaatgaatcgtgcaacgcgcgtgggagaggcggtttgcgtattgggcgctcttccgcattcctcgctcactgactcgctgcgctcgtgtcgttcggctgcggcgagcggtatcagctcactcaaaggcggtaatactggttatccacagaatcaggggataacgccggacaagaacatgtgagcaaaaggccagcaaaaggccagga

SEQ ID NO: 2566 - DNA, 855 bp, Mus musculus
gtggcggcgcggctcgaatgcctgtgcatcaaactcgggttacaggcctgggaacatgcacctttacccacggaaccttcctttacccacagagccttccttcccactgaccctgggaaacaatcttaacagcagggagtcctgtaaagcagactcgtgccctgccaaaattgcccatcatagctctgctggggagcagttaagtgtttgtcaaatgaacataggaacccacatcttgtgggtcaactcagctggcaaggatatttctcttgtctgtcccccaggtttatgacacaatgactgaagtcttgttctaattaaaatgttcactggggacctgttaaggtttttctctggctgcagtggatggctgagaatatctatctgtctgcagatgtttcagacaaagttatgtctccgtggttcacaaagatgatgtgtggagtcatgatcttccacagtcagtcaaaaggatattgatgttacaaagcccagtgatttcaagaacttgaacactgaagagtcccgctgcccaatgtcagccccatcttaatctcctgtatgtgtctgctgcagagcttgagagagacccagaagagctttcagaatgccagggagaaaggtatccattaagtcctgtaagtagaaggaggcatgttttctttccccttgggtataaatatggcaagcttttagaacattccttaacacctgtaattagcaaagtgcaggttcaggagctaaaactcagtttcctagctttaaacagttccagagagccttacacttgagcccctaattaccgaattctcaactcctatcgaaaaactccgcgaactccagagaggggaggaa

SEQ ID NO: 2567 - DNA, 766 bp, Mus musculus
aaacgtttaaatctaactcctggattgaaacagacttatgtttcaattctgccctctgaagtgaggtaatttcttatgaataagctggattcattttaaaaactataaatttagatttaaaaaaggataaagcaggctatgtgctatgtgtgaggtattgtacaacatggtttatgtgcatttgtttaactctttgaggaagatgctattattcatacttcagatcaggaaactgaggtgtacatagcagggggacacatggctattaagtggctagacttgcctgggagccaggcagagtccatcgtgacatgaagcttacactcttgagtgctgtagttctgtagaatgcatggagtctgagaaggaatattgctctaggctgaagatgtagcttgattgatgggtctttggttggcattcacaaaccttgagttccatcattagccctatgtaaactgggcatagtggtttatgtctgtaatcccagcacttgcaatggaggtagagtcaggatcaggactatccctgtggatacgtgcagaacctgaatacatgaggtcctgtctcaataaataacaaacaaaaaaactcaactagtttaggattctggggaaagagaagaaaaagaggacacacgttttactactctaaagttttctggtttttctcaacaatttgaaggcaagtgtctgagtctgtcattgtgtagacttgagaatgtttgtatttggtgtgcgatacatctgagttaatctggaagatt

SEQ ID NO: 2568 - DNA, 693 bp, Mus musculus
ggtggcggcgcggctcgatgtctcatatagctaaggctggcctgattgattcgtgtttgttttgagacaagatctctatgtggtccaggctgatcttgaagtcatgacaagcctacctcctctctgcctcctgagtgctggaattatacaaatgagccatcgtgtctggttccatgaagtgttagatagacagtttaaggactttggccaatgttatactggtactgctattataagctattgcctctcaaccttcatgactgcctttggaggctcctggaggggctggctcccttctgtgatgctccctaacagtgtgacagtatcatttctagcaagagtgtatgttccctttttcaagttttaaggaaatcagtctcaaacttgcagcagtccccctgcttctgcctcctcagccctggcactgtagacatatgccttgtgttaagtacacacaagccatcctgtgcgagaaaagcagcagatccaaagccaaccttttaggcttaggagactggaaagagagaagtaaagctattccagaggaagtggagcctggaaggagtctacggggaagaagattcttggagcagaaagttgtcctataattaaacccctgcacatgttaacagttctgcatttaaaacctacacagccaccatcaattagattagcatatgaccacttctaaga

SEQ ID NO: 2569 - DNA, 731 bp, Mus musculus
aagcactggagaaaattggcttttgctggacagaaatggagaggtcagggttgataggacctcgttttttaaggcctgagagacggcctaaggtctggaagtcatcactgaagtgtctctatcggactatgtgtctgaaacacctccatagctaaaacaatcctgaacaacaaaagaactgctggaggtctcaccattcccaacttcaagtgctactatagagctactgtaataaacacggcacggtatttggcataaaaacagacactttcaatcaatggaaccaaattgaagattcagacataaatctacacacctgtggacacctgacttttgataaagaagccataaatacaccctggagaaaaagaacatcttcaatcaaatggtgctagtttgcatggatgtctacatgtaaaagcctgaatcacccaacaagatatttaggtaggacatgtatgctgttaagtaggagcaattacaagagaactcactaatcaggagaattattaacgaggaagtagagttctaaatatagccttcataacactctactagatgactgcagcaagaactgtgctcttatttgacctctgaagcaaacagactggatacatttaaggaatgtttttcccaggttgaaaatcaggcattcatgagctccaataacacagatcctacgatggaattttaccaccacaggagtaatgccaacttgtaccatgttctat

SEQ ID NO: 2570 - DNA, 691 bp, Mus musculus
tgcggctcgagccacctggaagggccttcatgccatggacaaacaaccgtatggagttaacatctgggacccacccagtccagtggacagatctgagaattgggtccaatcctgtgcgcagatctctgagtaagatatatctggatgtcccaggttgttggagcaaggtgcacatctggaataggcctaaccacttgccacggtggaaggggccttgcccttttgtctctgtctcctagagttgaaattttagagctgaggtatatgtgaagtcacagaattgttttagatagaaggctaatgttctgtacaatatatatatgaatgtaaaaaatatatatatgcttatatatatgcacagtgtatatatgacccacaacccctgtgtatacaacccttccctgcacgtctacacacaaagtgtacagaacccagccagtatgggtggggacccagtgagagacaggggctgcagcagagaggtcaggtttacacagacctctggatcaagccagaccttgccagcatcagtactgtggaccacgtcaacagaaggcagactagtgcggaggtgacaggaaacgggacagccatggatgagcatctccctccagggagttcgtatgaggcaggacagcgggcacacctgaggaaaacggcttgctagtcgtagatccctgagccaatatca

SEQ ID NO: 2571 - DNA, 704 bp, Mus musculus
ttgagcatactgaattttaaatttaaaataaagctgcatatttttaaatgaaatgtttaacaaggattcatattttttgttttttaagattaaaaataatttatgtcttctcatgtggaacctcatctgtcacaatggttagattatacagaatggagcaaggcttgtagtggtttagcttacagtaaaattcttaatgtttagatgtgtttacttactggctgttatgtatacttttgagattttccacctgttctgtgtagttttctaaatgatactcctacttaaaaacagcattttagtatctattttctgtctccattaaatggtcctcattttctattgagtttggaagtgtgcacattgtgtgtgtgtgtgtgtgtgtgtgtgtgcacacgtgtgcgcgcccgtgcgtgtgtctatttgtggagtttgtatgggagaattagttttcgaaagtgctagaatagagatgaaatttggttcaagtaaaattttcccactgggattttacagtttattgtaataaaatgttaatttcggatgaccttgaatattaatgaatttgttagcctcttgatgtgtgcattaatgagatatatcaaagttgtatattaacaccaaagtaggcagttgtggaagtgtctctatgaagttccgtttggctaccaatggacataagactagaaataccttcctgtggg

SEQ ID NO: 2572 - DNA, 659 bp, Mus musculus
tggggaacactggtatatacaatgtgtctatagtttgtttagtttgatttttaatctgtgatctatatttggagaaatgggccagagatcatctgttggtcattcaccacatctcaaggatgttcagaaaaaaatagctgaattgggacaacaaaaatctcataaattggcactgcccttggaaccctgcacctgcagctaggagccgatcactgctagtgaatccctgcctcctgcctgacctgtacaagccactcttaaaggagctcctcagctttctcctgtaaggaagctggtggctactcgtgcaacaacatctctgtgaccatgagaatttagttcagcaggtaacaaggtgctgctgctcccttggaattacagctggaggaagtaaggaaaattttgtctgttttaaatgtacaaatttatgtggcactacatgtttgtttctgtctggtcttaaatgtatgagtttctaatgttctgtatgtcttggttatagactcttggcttgtggttatggttataattggtcgcataaggttaaaaatcgatcacctgtaaacaaaagttaccttaaaactcataactcagggttagagccattctagacagccggcatatgtcaggagccaatcaaggaaacaggtctacaaagt

SEQ ID NO: 2573 - DNA, 276 bp, Mus musculus
gtggcggcgcggctccgatttgtgtgtgtgtgtgtgtgtgtgttatactcacagatgcatattcacttgtagatgtggaggccaaagagaaacctcaggtgtggtcctcaggaaggtcatctgcctactttgggcctgggtctctccatggactcgaacctaccaattagggtagactggctatccaaggattctcctgtctacacatccccaccactgggattataagtgtgtaccaccacgtccagcatctctatgtaggttctgggcatcaaa

SEQ ID NO: 2574 - DNA, 756 bp, Mus musculus
gttgatacacaaacccagccagtacagtgttctatttcctttctagtgctgtgacaaagacaatggccaaaagcaactaataggaggaaaggattcatctgctttacactttcaggtcatagtccatcactgaagaaagtagggcatgaccttaaagcagaaaacatagagggatgttgcttgtttgcttaatggctcacttgctcatacttgttatataatgtgagaccacctggataaagaatggtgacactcaaagtggactgctttttcctacatcaaataacagccaatgtagctctccccaactcatgcccacaggtcaaagtgatctggacaatctctcaatcaaggcctaagatgactctaggctatattaatttgacaaaggtgaataggatatacaattaagtcattgacttggagataataccagtgtctcataattgttgcccttgatttacacttagcatagtttcaaacccccacatgctttggctcattgtattctcacagaagttggaacatacagtgttaaccacattacagttaaaaaaccaaatgcagcagataactttaacagtggcatgactaaataaatggcagagttatttagtctggcaaatcttgattttgaacctgtgcacttaatgcctcactaatatttctgaaatcatcacagattcaggggctgggaacagaatttcaaatctctgttactgggtacagcttattgtcagaaaagactcttggtct

SEQ ID NO: 2575 - DNA, 588 bp, Mus musculus
ggtggcggcgcggctcgatgataaattacgtctcagttgaattcttcatatcaaatttataagtcaaattatccttagccattaaagacagtcatttttgtcttttttatgtaaattattcaaatttattctcagaaaagataagtaaactggtaaatgtttaatatgtttcagaaaaactgatgagacagttttttatgtgctattaagtgatagttatgagctagtgataaaagaacgttagcaaggatgtcgctacatccttgataaaagaacaaaggagttggggctggaataatagctcagttggtaaagcccttgccatacaagctccggagcatgaggggtgtcccagaggtgtggtggcacacatgtgtaatcccagagctggggaggtggacctctcactgccagccagtttagcccagttgaaatcctggccagcaagagatgctgcttcaacagaggtgaaccgtgttccggagaggatagctaaacgaggttggcttctggcctccaccatagaagcctacactagctcttagacaagtgaacaaacctgcttttagctgtcccagagtacgaatt

SEQ ID NO: 2576 - DNA, 626 bp, Mus musculus
ccggtggcggcgcggctcgagttgccatataaaaatgtctgtatcaaagcatccttttattcaaataatcacattaaagtatcaggctcccagcatccagcccatgcaggagctctgtcattaaagctgatggggaggcttatggccaacataacagcaatggtggcttaatcctgaatctcagagtgttggctgtgttaatttaaatccctcctgcctaggagaaaaatatagacagcccccatggacagaagggaagctgaggcccagggggtccaaatcaaagcttttgcttcgagccctcagtggctacagattcagcaaccaccaaatgggaccaaatgggacctgggagaaagcagagaacacaggtcttacttcaagataataaaatggttcctaaagaaagctcaaacaataatgagatagcacaacaggtgaaaacttgaaaggctatattagcatgcatgtaaacagaacttttatagtttctaggtagtagttaaacaaaataacaacaaagcaatagcttttgctacatatctcttttctaaacgtactattaagctaaagttcaaaaggtcctgtttactgtaatgttgacaaaattaatacttctagtcata

SEQ ID NO: 2577 - DNA, 775 bp, Mus musculus
ccaaccagcactcagcacctggagtgcacataaacagcagtagtgtggtgcttaggaaggctggtctggttccccccagggactggggtcttcagcttcctttttctttacggtggctagagttggtgccactgtcccacctgctctcctatggtccctacctctgccttgcctcatcctcgccctctggtcacttgacagcacagccactggaagccaggctcagggtcttggctaaggacagatcagtaaactgtcccagctctggaaggcctggttcctgaagggggctcccaagaaataccagcttcagggctaccaaaaggctgagccatgatcccttatggaagggcctccacacagccatccagggtcttgtcgtgccatggtggctgtctaggggctaccagctcagttccccactgcagctcttcaccttcttgcctacccatccagaagtagctgaggcttgggacagagtcttgtgacagttcatcaccctggaggaaaagatgtcgtgactgctgccctgtggtcagagcctgtctgtaaggcttatctgaccaccccagactggagcttgcttccccagtactgcatgatgtcacacttcctgagcttggagtgagggtgcaaagccttgctggactcaggttctatccagactgttcgtaggaggcatttcctctttggcaagttccatccaggttctattccccaagttacccagagcatctctcatgtctttaaggaacaccgtttcctgggaagccca

SEQ ID NO: 2578 - DNA, 456 bp, Mus musculus
ctcaccgcggtggcggcgcgtgcagccccgataccgtcgacctcgagggggggcccggtacccagcttttgttccctttagtgagggttaattgcgcgcttggcgtaatcatggtcatagctgtttcctgtgtgaaattgttatccgctcacaattccacacaacatacgagcagggagcataaagtgtaaagcctggggtgcctaatgagtgagctaactcacattaattgcgttgcgctcactgcccgctttccagtcgggaaacctgtcgtgccagctgcattaatgaatcggccaacgcgcggggagaggcggtttgcgtattgggcgctcttccgcttcctcgctcactgactcgctgcgctcggtcgttcggctgcggcgagcggtatcagctcactcaaaggcggtaatacggttatccacagaatcaggggataacgcaggaaagaac

SEQ ID NO: 2579 - DNA, 749 bp, Mus musculus
caccgcggtggcggcgcggtcgtagccataggccagaaggtgcttttcggaggctgagctgaggtggaagggtggtgatagcgtggccttggagccacagggagggatgcgcaggcacactatctgggagtttggggacactgtctggatgaggtggaggctactgcagatgccctgtggagaagtgccagtgtcctcagctgcaagccagggagccctaccctgacactttcctggacagtgatggcctttgcctctgtcctccagtatctcgagcccgctgtggccaaggccttttgtgtgggttttccagtctgtcactggttgtggtgaccttaggtcttccctaatcacctcattgtttatctcagggttacttgagggttaattcagtgttggctacccaaatcttctaaggattgggtagaccagtgtcagtttattagtgtgtctcggctctctgtgggatacacgtagtctatcacatggccctgctgcacacacacacacacacacacacacacacacacacacgcaagcacgcacattcctcttgtcaaactagggatcttaaaatccacaggtcactgataatctgttatagcacttggatcgggtgtaaggttcggggttgtagagtccaatggatctagcttgtggcttcaacaccacaaacatagtgcatctgtatattcagtgtgacagcagattaacaaaaaaagagtctgatgaagtggcataaacatact

SEQ ID NO: 2580 - DNA, 351 bp, Mus musculus
cttatttgaccaagtttctatctgtatgcaaccaaagcgaactgagctgagacagttactggtgaaaaggcgtagctgatgggaacaaagccctgtgctataggaggctgtgacgcagcaagtctgggcatcgttggttatgctgaagggacctgctgccacgggaggtttgactccttgtcacttggtttctggtccctcccgttctattttcagaaacttctgtaaccttatgggaaatcacatccatcatatcagtctttggaaactattactgaaaactcccacaacaacaaaacgtaaagaacagggcactgttatcctccagagtgtctgtcagcaagtgaagct

SEQ ID NO: 2581 - DNA, 723 bp, Mus musculus
gcggggcggcgcggctcgaggttttctagatagtgaaggcatttttcagttccggttatgataggaaaggaagccaaaatcttatctcaaagctctcgcagtgtgatgcctgccactggtctgtttaagcctgagtgatgctgcgtgcagactgtgtgtctgtactggctcgtttccccaccgtggtgtggccccctgtttgctcatttcccaccttccccctgtcctgctccccacatatgttagatctcaggaactacagagcaagaggcatgcaaatatttagttgctttaacttttaaagcaggtgtcactactagcagtccaccattaaaatctcagaaatacttttggaataaggtgttttaccatctgaaaggacttgggtacaaggctattttcggaaaatttatccagggtcttggcatagcctaaaagataacaaaactaggatatattatacaacacaggtcatggcacatggaactccaacttttctctccttggcatattttagaaatgctgagaaccatcatcttgaagttgttgaggagtttctcctggctctgcagtctgacaaggaccaagataattcatttttttgcttccttagaaccaaagatacagaatgctatagaaaccactctactggaagacttgaactggcatcctgtgatgggtgcacagagatgcctctgatgaacatgtggcttgtactcgaag

SEQ ID NO: 2582 - DNA, 449 bp, Mus musculus
gcggtggcggccggtaccagcttttgtccctttatgagggttaattgcgcgctggcgtaatcatggtcatagctgtttcctgtgtgaaattgttatccgctcacaattccacacaacatacgagcagggactagtgtagcctggggtgcctaatgatgatatcatgtgcgtggctctgccgttctgggaaacctgttgccagtgatagatcggccaacgcgcggggagaggcggttgcgtatagggcgctcttccgcttcctcgctcactgactcgctgcgctcggtcgttcggatgcggcgagcggtatcagctcacctcaaaggcggtaatacggttatacacagaatcaggggataacgcaggaaagaacatgtgagcaaaaaggccagaaaaggcaggaaccgtaaaaaggccggttgctggcgtatttccataggctccgcccc

SEQ ID NO: 2583 - DNA, 839 bp, Mus musculus
cggtcgagctagctagtattaggttgaagtgggggtgggggctttctccgtaggcttggggatggttccctcaaagtgagccactattagattgcccatcaggggaaaagaaatggggttatatccattaggaaaatcccatttatagatagaggtgcgatcacataaaaatgtggccaggcaggattaaaggtattctaaatccttaccacggggcattttctggatgcaaaggcactagcccatttgaaaattaatattccgtgcctctgggccaagaggtcagctttctgcacgaggagaaaaacagtaactgctgtttgttacagcctgaaatccaggacgaccgcattttctcttggtttctaaaaggaagggaatcttcccgatttttctaagatgttgagtattgtgtaagtaagctttgagtctttgaacctgattgaaatgcaaagcaagggtgactcattgttaggagaagtaaaggccacggaaggtatggtagtttctggagtcctatctgagaactcacagattgtctttgcctctctaggcagaaacagagctacccactgcagcggcctgactgtgcagcactcagctctttggctctctctgaaatgcccgtctcatcctgtctttttcgagcatggctcacaggccttgtgtctgggtgaagggaacccaggtcaggctgcacttctgtttctgtcttttgctcaacagcggggtgtgcactcgtggctgcacagatgaagcccatgctgagtctgtgggaacacccacactcagtgcacctgtgggtgacccttcctacacagtgcaagagcagaagccca

SEQ ID NO: 2584 - DNA, 733 bp, Mus musculus
attcctttaacagacatgattagacctatcctaccaatgaaatgatgtcagttcagcagcaactagtatatagtaaaatacatcttgtatccctcatacaggaactatgtgtgtagagtggcctatagacacacacatgaaagaccaattacaacctgtttacaatgcattcatccaatttaaactttagttttcttcaacattggacccttacaccccattttttaaccactaattttactcttaagcacagaacacaaacacaacccagaaattcagcattttcacctcatttgacacaggctaatcattaccagctaacagacatttgcatgtctattacaaattcgcaaattaccagctgaaataggtggctttcgtatttcctatttaaagaaatattattttaaacattaaaagctaaccaggaagtcaatatattaaaaaaaataagtcaatggtataaaaatatgtattctggaatgcacaaaattgaagactattacaggtgccttaatgtacacagaaaatgctccaaatgcacaggcacctttgtgccatgaagccagcagtagcctgccatcctcccaggaggcagtctagctgatacgccattctttgcattctcaccgtgtcatcttgttagaaacgttatacctgggttcactacccttactcatttccaatcctgtatcccgtaatatcttaagtctgttttgatgcacaggtagtg

SEQ ID NO: 2585 - DNA, 778 bp, Mus musculus
aattgaactcaggacctctggaagagctagtcagcgttctcaatttctgagacacctttccagccctggcacatccttcttaagccaactagaccaggccatctccaggattcagcacagttccacttctttgaaatatttttatttcattgcaattcaaactttaaagcatacatggagaatcaaagcaatcagggctataatgctctccagtataaccaacaaaacattctagagacatttataaggaccacatttatgaatccaattagagacaaaaacaattaagaaaaaccttcattagcttttgtgcagcaataaaggataattcatgcaaatttagttaatagttaatttttcatcatggaaggcatgaatatatattcatcaagtgtttgtgaaaccatctttgcctaggaaacaatatgagtagtagtagtaacatatgcattcaaaagagaaaacatagcaaggaccagcaacctcgaagtcaaaccctctctctgagattttatcaatgcttttctctcagtcactggtttctacagctgattcactcttggtagagagtctcttgttcatggcttcatgactcaatcacccccattcaatttctattcttaggtttagcagttgtatccatagtggattttcttggtccatctttcacagatcaagtcactcattcaggttttcacaacgggatttcagtaccctgagaaaaagcacaaacctaatcttaaatccagtgaattcctggatctgggcagttctcatg

SEQ ID NO: 2586 - DNA, 673 bp, Mus musculus
tgcattcagaaatacatatcattcctcccttccaaaatgaacctacctgaattcagactgtttaactgtgagttaactgtgacattgtaccaaagggtcgcaattcccaagcactactttaaatctcaaacttaccctgctctttcaagtgcataagatcaacacagcaaacatttagcatggtttaggaatgactaggttcctcatgctaatataaagacataattatgatgtgctaggctttcaatagtgtcctctgcatgaggtagtttttacttaagtagataactgagttattttaacagttgttctatttcttgcaatctgatgagtctacattttcgcttgacttgttgtgaataatattatatatatgctattttactaacagattatactttgtgatcctttcttttaaaaataaatgtagttatcccaaacatagactataatatcatcaaataataccaagtaaatatatttaaggcatggttaataacatatattttgaaaggcaagctatttttttcatatttttatctttaattaatgcatctgttaatcctgtgccatttttcaaaagtttcatttgtggttcaaattatttctaaaaatattttcttttacctagtagtacaggttttgaggaaaacatatgattaaatgatcaata

SEQ ID NO: 2587 - DNA, 644 bp, Mus musculus
gcggggcggcgcggctcgagggcttccctggacccagcgagacctggcctctcttgtctgcacgcctcatgtggccactgggatttgagggtccacagtgaaccttgatcaaattgcacagtgggttgttcctccacacaccctcctttttttacggtcaatatatttgtaaatggtacaagatgaaggacaacaactgtctccatgggccacgtgccctagaaggactctccccaactgtcaaagctaatgctttgagcacttagcaaaccagcataagagaatctacccatggaatgttctggaaggtgggcagtccaggttacagttgatgaaggaaacagtgcctgtctgcctctcatgtgtgaccccaaggcagccaggctgtcactgctgctgtcacaggctgacaccttacagatgtcctgaccatgggtgaccctcctcggagcgtccagatcccctcctgctctgctctattacctactagtggtccctggcagctgtgggcaaggcctgggtagtcagactgttaacaccacagtccttagcagtggtcaatgtccagttcccccgcacaggtcctgcttcactcacatcctcacccgctgccaaggtggcggtttgtgcttgcagggcagcac

SEQ ID NO: 2588 - DNA, 761 bp, Mus musculus
cgcggggcggcgcggctcgaggtgcatatcttagagttgctgtgaaactctgtagaaataagagatgaacccaagttgatgtgatgttcctccttggaaattttaagaatatggcatagtagccactcagtttccactcctctactgattaaaagtgagcattaaatatggaagtctataatctttaataccccttgagacttttaccaatgttgccaaatggtaaaagtttcattaatcataacttgtttcaggacatgcagtttcagaaagcattcaggacaaactcatccacaactttcatcacacagtaatttaatatcacgaagggccactcaatcttggatcatctctcatccaaatgaatagagatatcatggtcacatttgaagcacattaaagaaacacactatcctattggcctgctgaattcttcgttctaacactacctcagcactaaagagtgactgcttataaaagcaaattggtttccagagtaaggaacaaatacaattttacagactgaagtcgtcaaatcaatcaacagttgagaccatactagacacagacattgccggctccttcccaagggcagtagcctaggcatcttagtcacagcaatcaatgacatagttaatgagttattgcaaaggatttaagtggcataattataagtcaattagttcactgttaggctcattttctacatgggccactttcatgtccaatcacttaagagccacagttacgcacacgaaagg

SEQ ID NO: 2589 - DNA, 775 bp, Mus musculus
gcggtggcggcgcggctcgagggcttcctggaccccagcgagacctggctctcttgtctgcacgcctcatgtggccactgggatttgagggtccacagtgaaccttgatcaaattgcacagtgggttgttcctccacacaccctcctttttttacggtcaatatatttgtaaatggtacaagatgaaggacaacaactgtctccatgggccacgtgccctagaaggactctccccaactgtcaaagctaatgctttgagcacttagcaaaccagcataagagaatctacccatggaatgttctggaaggtgggcagtccaggttacagttgatgaaggaaacagtgcctgtctgcctctcatgtgtgaccccaaggcagccaggctgtcactgctgctgtcacaggctgacaccttacagatgtcctgaccatgggtgaccctcctcggagcgtccagatcccctcctgctctgctctattacctactagtggtccctggcagctgtgggcaaggcctgggtagtcagactgttaacaccacagtccttagcagtggtcaatgtccagttcccccgcacaggtcctgcttcactcacatcctcacccgctgccaaggtggcggtttgtgcttgcagggcagcactgccaccactgccagggaggagcctgagcagcttccatagcagatccgttgccagttacctggcctgtaagcttcttactggattgattgtctaaggtcctgtcagagcccactagaagcaggtcctagtg

SEQ ID NO: 2590 - DNA, 570 bp, Mus musculus
  misc_feature (191)..(191): n is a, c, g, or t
  misc_feature (235)..(235): n is a, c, g, or t
gactagtgcccagcaccgccaagactgtcaaagcaggagacttttagtgcagagtttgccaaataataaatttcaacaaaatctcagagtaaaccattaagagattagtgaatccagccactgcttacagcaaggttactcggaatcaccagatttcatttcctctaattgatgtctttataaatgatctntggggaaaaaaatcctttagagagtattcatgagggtggcatgntggttacctccatgatctctaccaagctggaagagcaggaatagccatagggtcaccttatataattacaaagaaagaggaaggaagaaaggtttccttaaacattcaacccagtgattatttgggtggaaacattctagaagacgctgggtgtgcccgtgcagcgttctgttacacgctacaggcggggtccaccgagacaagtcgggtacattttcaaatcaaacttgagccccagtcatctttagctttcttgtggtttaaaaggcctctttatttttattgtacagaatgaatgcagttgaacttgatagatgttttaaaattgaaatgtg

SEQ ID NO: 2591 - DNA, 810 bp, Mus musculus
gcggtggcggcgcggtcgaggttttccaatagcactttatttcatgcctactactgatttaatttatacattaaaaatatctatcctagagttgtaaatacagaaaagcaatgattagtagtagagtttattagatggccccaagtttaaatgctttataatgatctcttgatagcttcttgatacttaagaggtaacttatgtgactttagctctgccgttttcctgtaattgtataatacagtagaggctgcccagccaactatatgctggacttatttctctcagctagcttcagcctagcttggttactaaaactgttttgtgctctgagtttggacatcacatgaatattggaaatctgttgttttcagtatagtacctaaagatttagtagatactgcaccacaagttcatagtttatatgaaagacaaagggcagaatttataatattgtaacagtttatattaagctgtttttataatctgccagtacaatacatctgctgtaaaaatataaaagttgtctaccccagtggtctccagcacagaacacaccaattctaaactatgctgtggacttttaaataagaaaggctagttatgtcttctacagggtaggttaactttaggcctgatagcttatacttatcagtactgttttaaacaggagtttaaaaattattttttgtagagggtattttaatttgggaactttcttttttgtaataggtgctatatgtaaatatggagtgagaagtgttgattaaaggtctagtttatttccttattaaaatacttttcatttct

SEQ ID NO: 2592 - DNA, 883 bp, Mus musculus
  misc_feature (426)..(426): n is a, c, g, or t
ccgaaagctagcccttatcataaaggctccattgtttactaaacgcagaactaaaggtgaccctcctccctgtttccaccctcccattgcagcccagtctgccctatcacactgcactctctgtggaagccataaaagtcgccagtgtgtccgttcaccttcacagctgaatactttgtacccgctaggcctgtttatagacttataatcagacctttccctcttaggggacagcttttccaagactccaaggaaagtcagattcctctgagaattttcctcaagttgcttcaaagagcaactttgtagctctccagcttcagtaaatttgtttaaagaaccagatgccatatcattcaaaaacattacgtttaattcaaaactactgtgcagacctacatattctgaaaacaaactcttcctttntgttcccttagtagaggctgtgttgttataaagtgggtctctctccaccctgttaactcagggcttctggttgatgtgtcgggacagcgtccctggagttgtttctgttactgtagcacagagacctgagtacctggccgtctgatctcctactgtctacgcagctttactctcatcactctgctctcgagtgccttcaaaaaagcccatgtcctggagcctctgtcccggtctgaatcctacctctgattgagtcgttctcctgagcatcggaattcaccctcttcccaagggtttaactacaaactctaacacctggctaggaatcgtgaacacagttgtgtattgtggccctgtcattcacggcaggctcacctttgtagcttcttgtatcttattccccaccaaacattctggactagagccattgtccttcacttctagtctttcaccaaag

SEQ ID NO: 2593 - DNA, 779 bp, Mus musculus
cactatagggcgaatgtagctcaccgcggggcggcgcggctcgaggaattcacaaaggtataaaatggacacatgagggtaatatcctggaaacaagctaatctccccttttgttagccaggaaatggaggctcagaaaattaaaacgattttacaaaacacagacgcggagaaagtgacaataccagagaagagctgccttccaattacaggacagcatggacaataatactctacctcttgaatctgtaaaacatccatggcaaaatttaaaatacgatttattcaagtcttgaatatttttcttgagaatatttcaatgcaaagtagaaaagggtactgtgcataagcagcttctagttttccccattagccaccttctgataaggctttggtgcagcccttccctccacagtgactacaagaacaagcctcttggagctggccatgctttgatccagaggctcgtgacttggattctaaattctaactgtcctttgtgtagcaagtgtcttacctgtgaaaacagaggaatctaaagagtgtctctcctcagtttgctgctctccagcacttgaaagttattagatattagcatgtcgatgaacactagcctctattaggtattatactctgggggctggaacgcctgtaaattattctctagtcagaaaacatgatgtgtcccttagcagagctatgacaatgctcttgacttgagtgtttactcaagttgagatgggcattgtcaaaatactgtgactgcactaaagaaatgt

SEQ ID NO: 2594 - DNA, 711 bp, Mus musculus
  misc_feature (329)..(329): n is a, c, g, or t
  misc_feature (597)..(597): n is a, c, g, or t
  misc_feature (640)..(640): n is a, c, g, or t
gcgcctctcctcccctcctctctcttctcctcccgcatcccgggcagggggcggggagcgaggggctggtgcggccggtccccggccacgcgcggagaggacccgcggcgccccggcgaagcacccacccgggtccttctcctgcgcggcgcccgggccgcgcttccccgctcgggcctgcggtgcggcggctgggctggcctccggggagccggcgcccgcgtggggctcgctgacagcgcgcccagtagaatattgtattagttggttgtgagctgtgttctcgtcagggtatctgagtttcacagaacagacggggtgagagtttntgtgctatatccagatgggcttaaaataatgtcggttttgtagcttattaaaccacagaaactacaccaaagtcagacacgctgctgtcagaaaactcagagtcggggttggggtaagaggaaactcaggccagggtctgacccctgaccttccagaaaggctttagaactctttctcctccctccaacccaggcaggcctgagcatgggcactgcccacacttctccagacgtcctgctgggacgctgcagggtgaggaggcaaggntggaatgtggtgaaagcccagaggcagtcgatgctggggtctngcctggcagaacaagggctgaggtggcatttcctggccaaaggggaaggctgaggaatgtagctcccatct

SEQ ID NO: 2595 - DNA, 640 bp, Mus musculus
gcggggcggcgcggctcgagctgcacagacacctaccagacattttcttggtttgatgttctcaagtatattcatgcccatgcagataaggggagtgtcatcccagcacgctgtgaggatcacttggccagactactatctgcaagaaggctcaacatgccactgtgttctggagactatctaacagacacacctttcctccagaaactgggctgttcacttttgctttagtgtggctgtatgttcaatgaagtcttatgttagtttccagttttattatgactggacaggagttgggtgtagggcaaatgtttttcaggggcccttgattctgatgggaagaaaagagacaaacctgtctgtgtctctgtctcctgaccagtccatgtggagcaaccctgagagagagagagcaatgtgattacaataagaacttggggttagttctatatcatttgaggagaacatggagaaaactcatctatgagagaggagagctgtccatacgactgtgtctaaattaacgtggatatttcagagttcagagtgatgtcagctaaccacattaagttttctggccataatgagaaaaactcaacacctatcggcctcctgttaaatcgagatatctctgtttaat

SEQ ID NO: 2596 - DNA, 865 bp, Mus musculus
cgcggggcggcgcggctcgagcacacaggtgccaccaatcctcccacgtggagggatttctccatgttacgatttcatcctgtattttctgcatgtaagtagccacaggggaagttagtaaataagatgaggttagcacttttaggtaccagtgtcctgagtaactgtactccaacagagcaaggacatatgaaatgtactcaagacttgcttctggtgacagacttggaaaaggcccatttccaatgacacacatgctttaaagagtgtacctatcacaggaccaggaatcaaaacgggaattttatctcctgtcctgtttgtaagtagcttttttttcctaagacaatctcatgttttataacttgttgtgtgtgtctgagaatcataatggtaatgtgttatggtaaatgtaatcttaaatacaataataattacaacttaaatttccaaatgaaagaaatacactgcttaggcttctgcaagagacatgacacttttataataagcattagtacttctcaagtttaacagaactggaaatattttacaagataccgcgtttgtaatcacagagaacatgaacactttgtgggaaatgaccttggttttatacattgtagcttattttttaaaatgcagtattttaaccggcaggaagtgtagatatggcacacagttcctgtccctcaatccaagggctatgcctcttttaagcaagtgttttgatgcgtatcttttcaattaaccctctgagcaagggtagaaatgggaccagatagcaaggtcatttgccagagaatccaatgaagcagaaatattccctcatgaccagtgtgtattcaaagcatctttgtgggggccg

SEQ ID NO: 2597 - DNA, 854 bp, Mus musculus
gcggcgcggctcgagaagcccctccccttgccgtccccacacctccacggagagtgacccagggcctggtgctgctgtgctgactcgtgaaccatgcacaaggcgaggctgacccatagccccttcttgctctgcccttggtttatacgcctgggatgtgggtaaaatccgtatcatgtagagcaaagtcttaagtgggctgcaacacgtatgtgctttcaaacacttgtaaccccagcatttgggaaatggaggaggtcaacctctactccatagcatgctccaggccagcctgggctaccccagaaccaaaccaaaagccaaggaaaatggagctacccaggagctgcccacgagagcccgactcggtctcactcaccctggttttacttttcaaccttattctagtgaagtgacttgaaatctggttgcaccctctttgctgtctgaaaattagagctgcacaattcctgggaattacggcagtgcactgactggccactgctgcctttgaccagctcttcccacgcgtgctcaccattaggtgaacattatattccactccacactctacctgcacaggcactgtggtcattttttgtatggactaaatggtatagatctgttagtgtgtcaggagcaataggcagtaatcaaaaaatcgtgctatttaaatcttttctatgtgtaatgcttatggcatgaagactttgtatcgaatcaagattgtatattgaccaggttctaaaatgcatagtgattgttcttcagcccacaagaaaattcaaagttaattttttaatttaccgaaaagtctctttttatcttcagaatgtctcatggtctattatacc

SEQ ID NO: 2598 - DNA, 790 bp, Mus musculus
acgcggtggcggcgcggtcgaggcaaatgtgaattaactagaggttgtggattgtttttatgttttgttttgtttttttttaaaaaaaaaaagtctaaatgtggtcatccttactctattttatatcctgaatttgtaactatgcattttctgaaaagggggaaggcagggaaagaagccgattgcatccttatgtactccagtttctgtgtccatggaatccccatgtctgggaagggaagaagaggagaggagaaggctcgctaggtcagcatagtgagggcgagagggacctcccagaccccatcctctggaaggtctgattgccaagcaaatttgggggagaggggggtctgccatgtctgtccatcattacggtgcaggattcttgatactggccatgcagtgttaacccagggcagccatggaagctcacaggctccagtattctctgaactctgaaccctttcaagctcaggaaaccatgccacactctgctgacctgagagttcatcttcttcttttacgttcttggttttcagtcatggtgtagggtaccactcctaattatgagccgagaaagagggctgttcccttccatgtctgctccctgacctctgtttccctcacctgtactgagctggtggcacagcgagtgagtcgtgggacactggaatgtttcatactttctcttgtgttgttacaacaattcctgtgtagagttggactatgctaagtcatagcgcctgcattggtctggtctaggcattattacagcacgtagtataga

SEQ ID NO: 2599 - DNA, 763 bp, Mus musculus
gcggctcgagctgtaattagcaggcagcctgcattataactggtgttcctgctgtgtaaaacataaggactatgtaattcaatactaagaggattatacaagtaaatactagatgaaaaattataaaagagggttatactattacattcctggagtgctagaaccaggatatgaaatagaaaggtcaaagtaagatgcctttatttaatcaaccctcatctggctctatctcccctcaaatttgttcagaattttcttaaaaggttttctgtggttttaatcagaatactagtaatttaaattttttccatgttaaagccatggtgttttttaatttggttcttccaacacaatttattcaattttacttaacttctaccaggtctggtttaggcttagcaaaatgcagtgtgttgaagcaaaacttagaaatggtgggaatttgcttaccctagggaacaggtcatgttcagactagagcacccagcactgcatgagttcagttgatgcttttaaaggccgtaccttcttggaagggatgataatgcatggccatagccatgccatgagctacagttactgaaaacatcaggagcaagttggttaggctgacttcccactatctagcagggaacaaatgctgtggtgtctaagtgctgaggtagcctaaattatattctagccaaactagagtttttctgaccatcttctggagtagggagggtgtttttaaaaagatctctattaaagtataccaggaggg

SEQ ID NO: 2600 - DNA, 717 bp, Mus musculus
cggggcggcgggtcgagcctacatctatcccctttattgtatgtctgtcttatctcatacttctcctctcctcttttatacaaaaaccctatgttgtgtttgtctatgtgtatgtctctgtaccacatttccagagaccagaagagggcatcctgttctctagaacaggacttacagatggtgattagggttatgtgggtgtggggaaccaatctcaggtcctctagaaccacctctactgccacctttgtactttgtttataaccttccagggctatacttctggtcttcatgggcacctgctctcttgtagtgcacacgaactcacacaggcatacacacataaaaatctgtataacctttcttaattaacttacatacttatttaacttatacttaatttacaataatatactaagtatatacttaattaaaataaccgtgcttaattaactatgttagcttgtaacagtattccaagttttctttccctgctacttttcccacttcatcaccaatcctgctgctctcccatatctaattgtagttaccaaaatgtaacgtgggttaacccagcctactgcattcctaggcaggtgatcctgagctgtctaataagctagccgagcatgacaagagtgagccagagaacaaagcagcaatcagtatccctccatggtttctgtttgagttcctaccctgaatacctcagtgatg

SEQ ID NO: 2601 - DNA, 637 bp, Mus musculus
acgcggtggcggcgcggctcgagctcaggtttgggacccgagcaaaccaggactaggcatgccctgtggtctttctgcatctgtttactgccactggaaggacatccccacgcatgactgtcacctaatgctggactgggagggtccatgttgtctgcctctcatccccttgaagccctgagctggtgccgtgggtcccctcaactaccaggggattctctgccctaagaagggcacagtcaggctgcaggctgagggctgggtcctaagacaccgtggctgaagaaaataagggagaaagtgacatcacctcagcaaagccaactatgtccaccgaacaccagggagattgcggccagtctcctcccctgggcacaccccagtgtgttgggtacagtccaatcgtgtcatgcccctgcttcatggatgttccacccacggtgtgctggtaggaggaatcaggctgaaatgttctgaaagccagcagcctgaagccactgcttttgggccagccgcgtaggcctcttgggttgcaccttcagggacagaggtcaggacctggctggcttccaaggactgcagcagccatggaggcagtgaggagcatgacacaatcatcatggccagaaaaggcatg

SEQ ID NO: 2602 - DNA, 721 bp, Mus musculus
cggtggcggcgcggctcgaggttttttttttggtttggttggtttggagaaaggagctctcgtacacatagtgctgattcgccgggaactcactatgtaacaggttagctttgaattggtaacaatgtcttggcttctgcctcctaaacccgtggattacaggtgtgtacaatcatgcctgacttaaaatggactttaattggtctccttccaaactcaggtgctatgaccaacatattttctcatgccgggtctctcgggtaccactttggacatactttagtaccttttggataaccgggtaatagtgacctttctcatccattaaatcaaatcatctatggctgtgtagaataaaattgaacccccttaccagggctcacaaaaccatgcaccatctgacccttttctagttcttgaacagcctcgggacccttctctcactgtttaccatgcgtgcccatgtaacatgccaagcaagttttttttttctggtacctcagggggttagtaaaggctactatttctaagcggcttttcagggccaccctctctcctccattacaatttatccggtaaatgggtgcagagtttggagagaggcctcccgggagtaccaggttgaagtagtcatgacctcccaaccatttcctctcccagttctttattggtaatcttatcaattggtggactctgacttatctccatttccccattccag

SEQ ID NO: 2603 - DNA, 355 bp, Mus musculus
gcggtggcggcgcggctcgaggggaagggggcctgtgcttctaaactgagtggttgctggttagatatacaaaagaggataaaactctggtaggttagttcattctcagcatgtgtagctagacaagagtaaagataacagcatggggactgttagtacgcacacctcagttcaaacctttaggggaatgagtttaaaaaaaaaattaaaaatatacctttcactcagtcgtacttagtcgtatgtcttgcatgcttagtctaaagactgtagcaaagaaaataaataaaagagaaaaaattagattttatgtatcttttcaggtgtcatagcctggcagaagaaccctgaaaaa

SEQ ID NO: 2604 - DNA, 743 bp, Mus musculus
gcggtggcggcgcggctagagggcaaggcatattcaggaaggctcctgctgctcactggtaggagaattctggagagtgtcatctcacatatagagttggatgacctggggtggcctggtcctgatgctggctgatgactgctgcacgaggggttcttcctagctagaggccatctgtgatgctctgtgggctggaggcaaggaggatgtggtaggttctagtggctgttacacaaggtctggcacaccgtgagcacaacttcacacagacacactgagtcatgcaaggcaggtgtcgacaccctgcagagtctgcctcacctccaagaattcagagggcacttttggatggatatgggaacccttgtttattccttgtgagcacaggtccaataataggagatgagatctgtcactctgtggttcattccataaatgcttcagatccaacttcaagtgccacattctgtcactaaacaattatccaatcaacacatcattatctaatgactaagacatttgggtttttaaggtttctgaccagtttaatccattctgttccacacataccagatctgttcagtagcttataaaacaaaaattactccactagaggctgtgcttaattcaaatcaatgtgtgttcctgcgcatgtgtgtgtgcatgtgggtagacatgtgcatgcatgtctaataagaccataaaattattctccctggggttaagattactcactgaagaaa

SEQ ID NO: 2605 - DNA, 733 bp, Mus musculus
caccgcggtggcggcgcggtcgaggttttttttttggttttggttggtttggagaaaggagctctcgtacacatagtgctgattcgccgggaactcactatgtaacaggttagcttggaattggtaacaaggtcttggcttctgcctcctaaacccgggattacaggtgtgtacaatcatgcctgacttaaaatggactttaattggtctccttccaaactcagggctatgaccaacatattttctcatgccgggtctctcgggtaccactttggacatactttagtaccttttggataaccgggtaatagtgacctttctcatccattaaatcaaatcatctatggctggtagaataaaattggaacccccttaccagggctcacaaaaccagtgcaccatctgacccttttctagttctggaacagcctcgggacccttctctcacggtttaccatgcgtgcccatgtaacatgccaagcaagttttttttttcgggtacctcagggggttagtaaaggctactatttctaagcggcttttcagggccaccctctctcctccattacaatttatccggtagatgggtgcagagtttggagagaggcctccctggagtaccatgtgtgaagtagtcatgacctcccaaccatttcctctcccagttctttatgggtaatctaataatgggtggactctgacttatctccacttccccattccagaatgtttg

SEQ ID NO: 2606 - DNA, 546 bp, Mus musculus
ttttaaatatctgatcatttatatgtccgatcatttcagcacctccaaagggtcctaggatattctgcctctctcttcaccctgtccccagacgggggaacccgtgggtcaggcgtggataagcctgcgagaatacaccctttctccattcactttctatttacaaattaggaaagcaacctttcagtttatatatatattttttttccttttgatacctcagtgctgcaagtatcatcagagaggctatggaagagtttgtgtttgtttttgtttgtttttttttttaatttatggtagatgtaaacagaattttaaaaataaaatataaacatcactgcactgtgactggtggggaaaactgacagcttcctgttggtacacatttgacattggctgttataatatatggtcctcagttggggaagacacttagaatgaaggatgttttttaatttaacttttttttttttttaaaggaaaaatatccgtaataggtcggaacagagccgtaggaagtacaacttagggtagcattaaagcata

SEQ ID NO: 2607 - DNA, 740 bp, Mus musculus
gcggggcggcgcggctcgatgtaacaatctcccctcatctgagaaatatgccttgagaaatacaggaaaagcaagagtgttaaaaccacctcaattctgcatactacatgtgtgtatatctgtgtgtatatgttgggagatgacagcataaattttgcttctaaaccccacttctactaagatcatgttattttatatagcactgttgataaatagtaaacattttttttcttttgacattttatttcattggtgagatatctgatacaagttatttggaatagcaagagaggagaacaccactattctatatattgaacaatatataagcaggagtagttttcccaggcccagatttagcttctcagcattggccttcatactgagcttgtcagaaatcatgcagtaattatagattcctattgtacacatttgtttataagaggttggattgatatcccctaaagtgttaactttacccatgaacggtaattcagtttggatgacctaatgataaacacacatctgagactttcaatgacttctgtagactttattatgaagaaagatatccaactgactgagtctcagaggagtttcctctgtggagtttcccgtggtaacttacagaatttgtttcttgagtaaaagaatcaattctgtatggagtttaaattgaaatgtgaatagttttgctgtatacatttttaaaatggaatacagcactaaaatgaaatatg

SEQ ID NO: 2608 - DNA, 834 bp, Mus musculus
cgcggtggcggcgcggtcgagattcactatatagcccaggatagactcaaattcatagtcctctcccttcagcttctcacatgctaggattatagatgaggcccactgacattgacacagagccctgatgctccaggccacagacccagacatggcccatcacccactatggcctgagggaacattgctggctactcacaacaggctgttcctctccatgcttgcatctccagctctgtctctctttgtgcacaccattctgcttccctttctcttctatctctcaccacttacttgtgcatcttagtgccctccccctcccagcagggcttgtctctgctgtgctctgcttcgatcatgctgggaggcaccgggccaggcaagtcttttatatatttcttcattggtttttcttttttgtcttctcttcatggaaggatattggtgtttccaaatatataactgtggaattgtttgtctctcccttcagttctatcagtttttagctcttgtatttggaagatgcacatatattcatttagtttcattttatttttgattttgcatttaaatcaattcattttaaagtactcatacaaatatattttgtatgttgatcatgctcatctctataactcccgtccccctttcctcatgtttccccactggctgataatcttctctgtcttcttagacagttttacttctactttcatgtcaccatgtgtaccaatgattttacgtatctatatcaatgcaatctatgagcacatattgagagaaagacacatctttatcttcctcagactggttgattcacttaatacaactata

SEQ ID NO: 2609 - DNA, 757 bp, Mus musculus
  misc_feature (545)..(545): n is a, c, g, or t
cacgcggtggcggcgcggctcgagctgaaagctccaccatcaggagcgttgttgacaggcctacttagcacgctgtgtgacagccatctaaagcccctatggggttgatgttctcaggaaccagttttgaatgtcctgtgttagagctcagggttgagatcatgtgatctatccgggtttctaacacactagaaactcctcttaaaaagttagcagcagaccagtgagagcgggactaaaggcgttcactggcaagagtgttctcggaactcatgtggtagacagacctgactccagcagattgcccgcaccacacgtgagctctgacacaggcacacatgtgtgtgcgtgtgcagacactcagaccaatattttaaagccagtaattagggaatgatccgcagcatcctttgggttggtttatagtccaaggaaaagctctttcttgggttctgtctccaacaccaaaaccataggtattttctgacactggtcatacacacatcagttttctatttgtcgtatctgaaaagtgaacaaacaancccagggaacaggttatttatcactgattatttttaatgattttgtgctatgatttgaccatggcattaagaacaagcagaaaacctgatttcataactaacaaacagcacttgtgcaacatctttcatcaaaagtattgcaattacagacctgaggtctaaaccacatcgccgcggggcaaaagatgcaggtggatgaccagtggagaatc

SEQ ID NO: 2610 - DNA, 852 bp, Mus musculus
ctccacgcggtggcggcgcggctcgagcatgaacaaaaagtgtgagcacatggttgactggttttgaaggcatgagggatacaagattgaggtgatcctggagtcttgttttatggctttggagagcaactgaggccagaaagtcactgagaagagaccctgagaggtcactgtgtgaagttgcaaagatgaagcccaaatccaatgacggtggagatgccagactagagagcagccactaaggaaagctacaggcatgaaatgaagctggtttaagaagacgactatgtatgctggtacctaatctcaatgatcctggtgtggcagacctctgatggatatctttggactggagaatggaactcaggggcaatgcaagtctcccagcagtttgatgtgcccctggggacatgacaggcctacgcaccatgcatgcacctggtgcacacagaagccagaagaggacattggatcccctggagctaaagttacagaaggttgtggaccaccagttgagtgtagagaatcaaaccttggtcctgtggatgatgagccagagctcttaaccactgagtcactgccccagccctaatttcttttctggatatttgtgattacataacctggcaaaagaacctaatagagaagaaagaagcttattcgaattctcagctcaaggccacagttcatgaaggtaaggaaaccaaaggagctggagcttagaccctattgcctccacagtcaagcaccagagggggacgaaagccatgttgctgctcagtcccctttggcatacgtcatcaggaccccatccagaaagatggttccactctcagtgggctggttcctctt

SEQ ID NO: 2611 - DNA, 816 bp, Mus musculus
aaaactcaccactgcatgatgaaacatctgcttctagaaatgtcataagccactagaagtcacccaagaacaagacttgagtaccaggaagcataacatttgcagcttaatgatgttttcctttgagttaatgatgttttccttgtaaggctttgcttttttaaaaataatttaaataatacattttatgtcagcaacatatcaaaatattatttccacaggcagttgatatgatttatgcatgacatttttatatcagaccgtattttatatcatatttatttatttgcaaagtaatgaggaacctgtatcaaaagagaaatgatagtattgaggataagagagtccaagagtcacatgggaggtggacagctcagagatggctctgggtcaagagtgcacaattttcatgcagggtagctcggttcctggggcaggtaacaactacctgtaaatttaactccaagggatctgacttagttttctgacccctactggtcactggtacttccatcatatatccccaggttacacatatacatacatacaagtaaaatttaaacaaatacactgataaaaatgatagtgtgccttatgagtaaagagacccaaggagccttattagttgtgctcatgaatataatatatttagagtgtaccagccccagatcctctaagtcatcctcaaattcacgtccaatttcatgtctttccctcctccaacgtcttcctctttcttcttcctgtgaataaattaatgctggctcatgttcctgggtattagacaccatctaacagaccatggtaattttagta

SEQ ID NO: 2612 - DNA, 664 bp, Mus musculus
cacgcggggcggcgcggtcgagagcttgctcttattcctgacgttttaggaatgcctccatcagtattttatcagattttaatattaactactgaactaaaatacaggccttcaggcaaaggacatggctttctggttcaagtataccaaacattattttagaagttcatgttgaataatattaatcattctagacaactagagattatcatagagttttattttgttgtctgtcaccacaatgtctaatgtcacaaaaaataattattattaaacgatttcctaattccaggctctttctgcataagatacagtctgtaatcatggtgaactttcccttcattttaaagtacatgagtacattttcccccatttatatatatgagtacagtgccactgtcttcagaaccccagaagaggacatccgatcccattagagagggtcatgtgtcaccatgtggtcgctgggaaacaaacagcattttaaagtataataatgtcaaattaaacgcctatattttaagtggggttattacacttatattcataaaaaagactagatcgtagtctcatattttcgtattctctcttagattcagaagtggggatctctcttgtttttatgatataaagtagcactgtaggagctgtctggtccttgatg

SEQ ID NO: 2613 - DNA, 834 bp, Mus musculus
caccgcggtggcggcgcggtcgaggcggtcgagctcggctcagcccaactccgccagctccgccggctccagcaccgctccaacccgattccagccggattccagcccgattccagcccggttccagcccgattccagcccggttccagcccagctccgtcccggctccggttcttctccgccacgcctctctgtcgacgctgaggagcagcttcgcaggaaaatcccagaaacctttgcaaaaagcttacaatgaaatttaagaagttctacgatttcggcgccattttcgagtggagtgagattatggaaaagttggctggaaggtgcggaggacctgtgcatcatgttttgggtgtgggggcgcatggcatctgcaacattaaaagacaaaacgttctcaactgggaagagaggaagaggcttagtctttggctcttaaatcatttggccaaacccttcgcagttctgaagtgggtggggccattttgacccgtcgtggttctgaagtgggtggggccatggtaaccctaaagtattgattctttgtctattgtatcagcgaatgaccctctctagaagtgaccagacatctctttgtgctctcttttcgtaagtaaagttaagcccaaggggaaatacacaaacccagggagtgagatggtttttaaggatataagtcgttgtagagtgatgggaagaaaagaaatggatgaaggataatctagagatgaattcgattccagtgtattcgttaacaaaattatctaagtaagaacttcgtttttgatgatgttatctcgaatgaattttgtttttatgagtagtcaacta

SEQ ID NO: 2614 - DNA, 788 bp, Mus musculus
gcggctcgagccaaggctgcacaggtcctgtggggacagaatccaagcccttcacctggattggggttcctccgcctgccagtctcagatctctgatcttgaacaaggatagcatgcagaagagtaaggttccatgcctaagtgacctcctctggacctcagacgcagttcttgctcctgacctcatgcctcgtctccagacatcactccccagcttagcccttaggtcaggctcctctgggcaccatccttagattcaacccaaaggagggtcctctcattctaaccagactgtctctccaaataccaccctagtcagctccttggcttctcagtgtccccttggagaacatggggtataggttcccagctagttcagtggcattccacagcccatctcttgtgaggtcccactccttaacaatggtctttcagtttcaaacgcatgcggccagcgggcagtctagggacccttcaaagtcaatgcttcttgattaaattatcgagactaatgtttaactttgagatacgttttctgagagttgctaaccggttggagatgaacttagagaatagggttcacctttttcgtctgtcagcgggttatcgagtgcccagtggtgtgccagattcagcagctggtgcaggagatacattcgtgagcaaaacagatctgagccctgacttcgggagggctcctcctaacaactagggcagatattaccagtgttccctgaatacaaacgcctagtctggcatggtggcacacacctatgatggtcagcctt

SEQ ID NO: 2615 - DNA, 820 bp, Mus musculus
cgcggggcggcgcggccgaggggaattcaggtctccttccccagctgtgttctgctacgctaagatttcagacgttcagaactttagtatttatcagtggagttgtgacaagctggtgtggcgctggctgctcactattcaatcacaagctgaagattttaaatttcctttattgtcttttgtgtagaaacttaacggtacttttcatcatgctaaaggcatctgtgtccaatctctacatccatccctctggaccgagacacgaatgttaatgctttttaacccaaagccatagctttgctaggactcaggcgtgagtccactccaggtgtttaacagacgcctgttagctggcttttctatgatgtggactttttttgtacagattaatgctaatagatctaaaacttgtatcttttgtaaactaagaaaattcatgtaagggactggaaagatggctcagaggttaggagcactggctgctcttcccaaggaccaggtttaattcccagcagccacatgacagctcataactgtctgtaactccagtcccaagggaccggatgatgtcttctggtctccttgtgcatatgtgagctgcacagacacacaggcaggggacacctacatatgtaaaaattaaacattgaaaagattaattcacgtgagcttccgagcattgaaggagtcattaagacttggacccacctctcacaggtcacaggggctcccagataagtcctgctaagcctgtctatctgctgtccttgaggctgggatctcttacctggtctgggactccgccctctctagtttccag

SEQ ID NO: 2616 - DNA, 828 bp, Mus musculus
ctccacgcggggcggcgcggctcgaggtttcttgtgaggtattctgaccataacatacccacaaaaatttattttggtgcagcctatttcattatgtaagatttcgttgacaaaccataaaagttgaccacttaaaagagttcaggtgctgtagaagatgacctattttctgagtgtaacaactatcatcatgttagagaagctgtgactaacaagaccaccaggatggggattgctgaggttctcctaatagcagggaggaccttttcctcctcacttagatcctagttcctcttccctgtgtcatcctcctggctgtatgtattcctgcattcactggttcaccaagctagacttagaagaaatcctccctttgatctgttggtggtgacccatctcgaaggggtagtggtttgttcacattttcccaggaaatgtcacacaacagagagctttcggagaagtgaacacatagaagttcctagaggttgtatgtccagcaaagacaccacaccttgtactttttaccatatgccctgtgctaggtgtcaccttgtctgatgcccatagttaattattccttttatatttaaaccagtaaactttagtgcttccctaagcactgtaaactgctttaggaaattagtcaaatctgaggagagattaatggcagcacaatttacagccgttggtcagaaatacaggcagtgaccaactgtgttgccactggcatctgcagtgtggggtagttgtgtggggacagagcccttaaactgtgtatgaccaatattcaatactggtgctttcaggaagctagcatcgtatctg

SEQ ID NO: 2617 - DNA, 773 bp, Mus musculus
caccgcggtggcggcgcggctcgaggtgtgaccctggctgtcctggaactcatctctgtagaccaggctagcctcaaactcagagaaatccacctgcatctgcttcccaattgctgggattaaaggcctcatctagctcttagtaattcttttcttgtttactttttacaaagttttaacacctttgtaaactaatgggaagactgagaaagaagctcctgagttgtttgcctctcaattgtatttgtggttaaacttgactttacattcagtagagttcattaaaagattgggtttgggcgttgcttcttgtgttgtagtctcagttgtcttttcatatgagaaatctaaacattttactcttagggttaatgaattcatccaaagctgtcataattatcacctccagttggagttctgatctcgggtttggtttgtttctatatatatcaaaatgaaagaacatttgtttaggaaggacttgtagattgttttttctcaatagttttagaagtcatgtttcttttctttcatagtctttttctgtatgtgctttccttctgttttctgcttagcagtcttcctgtagccacgtggcattcttagtaaggatggtaggtaagtgcctagcagaactctgtatctgctttttccttcctgtgatccactgattccagtgtctgcgtgagcttcacccgtggctgcaggtcagcacttattctcttgaccctgtgggtttagtacaatttttgatacaaaaggcttatttgaaa

SEQ ID NO: 2618 - DNA, 853 bp, Mus musculus
atagggcgaattgtagctccacgcggggcggcgcggctcgagttacttttaaaaagtctttaggatctcctggggctttaagtccctgatagactggatgtggtcttcaatacaatgtataaactcctgaaagtagggtgcttttctcattcattccttagaagttacatctcccctaagagtgtgacttctctttgaaagataaggaaattaaaatccaggaaagctagccagtcatccacaaaggaatagataaatgaagaacatctggaattcttccactgattcagaatcttaatgttccaccaggtctcaggcagcttgtgcctctacagtctcaaggtctcgaaaatagtggtatgtactgtgatagctattcttgtttgtcaacttgactacaactggaattaactcagacttccaagtggggaacacctgtttttgaagtgggaagatccacttctaatcttgatctttgaggtgggaagaattacctttaatccagatctttcgaggtgggaagatccacctctaaccacatggaagaaagaagcttttgcgctttgcctgcttgctcttgcctcagtagcaagttcattccttcataggcattagagtctgcttcttcaggattccagcatacacggaagagcagctgaagcattcagcctcgtgcactgagagcaactcctggattcttagaccattccttcaaggcagccttgttggactcgctggagcacagctggaagctggtctaagaaatcccatttctatacatagtgagattcattcagtaagttgttattcttagagaaccttgatcaatacaaagacctatagcatgatggga

SEQ ID NO: 2619 - DNA, 755 bp, Mus musculus
tccaagggcctctgtgtgagctgggtgtgtttacaagggatcagcgccttccaactctgtggcttcaccccctccccgggctgctctcagtcccaaaacattttactaaagtcatgggggacgggtgctagttggccttcctgtttctccccacagcctacctccaccagggcttcacatttggagctctgcctccatatggctgtccactagccccacccaggcatggttcatccctggagttctgacttgtttatggagccaactcaagttcttcttgcccggagctttgccttttgtaaggcagggaccctcccttaaccagagtttaccccagtagctgaccaagcatggggtgctacccacatgcctcaccttcccactcctcctcacaagtcctggagggagttttaagacttgcttatggccttgaaagaagccagggttgtagccctgtgctccccttgaagtagctggcacattgtaggccctcagtaaatgctgaatgggtggatgacaggtgctcaataaatgtggattcacggcctcatctcaggcccatccttcaaggctgagcttggccaccattacagttgtgggtgaagcccctatagttcacagtgtgctactcaacagtttgccatctgcttcccgaaagcaaactggcttgtgattgccatgtacggatgcgtgcatgcactgtgtgtgtgtgtgcgtgcgtgtgcgtgtcttgtgtctgcacacacacgtatgag

SEQ ID NO: 2620 - DNA, 790 bp, Mus musculus
tgcaccgcgacgccgcggtcatgagccggcccagccggttgcagaggcaagttctgagcctgtaccgcgagctgctgcgcgccgggcgcgggacgccgggcgccgaggcgcgggtgcgggccgagttccggcagcacgccagccttccgcgaaccgacgtgctgcgtatcgagtatctgtatcgccggggtcggcgccagctacagctgctgcgttcgggccacgccacggccatgggtaccttcgtgcgcccgcggggtccggctgaagagcccggcgacgcgacagccccggggaccaggctggatgatggtggtgccccaaagaattcttgtgaagatacaggggcgcgggagacgcgatccgatggacggtgacagacagacctagaggaaggttccttctgacagtttggggaggatcgtgaactcatctaaatggaagctgagatgtcttgagagataaccgaattttcccgatgcatagtgagagatcagacactccctcaccaaggaggttccgggcattctgtggcactggcggactgcataagacatgctgtgatacaccaacccaaagtcaaagagagagcacaggcgcactttctcctcccatcggggccgtggcacctcttgacagacagctctcttgacttcttaagaaacaaaccaactcctcactccccggcccttgctggtttttaacgtgggagaagacagactttttggccgcgctcgtttaatagaataccctgatgaaccgtgagaaacttggcagtctgactcgttgt

SEQ ID NO: 2621 - DNA, 782 bp, Mus musculus
ccaccaaactgggaggcacggattgacagccacggcaggatcttctatgtggaccatgtaaacagaaccacaacgtggcagcggcccacagctccccctgccccacaggtcctgcagcgatctaactccatacagcaaatggagcagctgaaccgacgttatcagagcatccgcagaaccatgactaatgagaggcctgaggaaaataccagtgctatcgatggggcaggggaggaagccgactttcaccaagccagcgcagacttccgtcgggagaacgtcctgcctcactctacctccagatccaggctcacgctgctgttacagtcaccccccgtgaagttcctcatcagcccagagttcttcaccgtgctgcattctaaccctagtgcctaccgcatgtttacaaacaacacgtgtttgaagcacatgatcaccaacgtccggcgggacacccaccactttgagcgctatcagcataacagggacctcgtgggattcctcaacatgtttgctaacaaacagctggaactaccaaggggctgggagatgaaacatgatcatcagggcaaggcgttttttgtcgaccacaactcccggaccaccacgttcattgatcctcggctcccacttcagagcagtaggcccacaagtgcattggttcatcgacaacacctgacgaggcaacgcagcacagtgcgggtgaggtaggagaagactctcggcacgcaggaccaccagttcttcccaggccatccagtacattcaatacgggtcagtag

SEQ ID NO: 2622 - DNA, 657 bp, Mus musculus
gcggcgcggctcgtgatttaccttcacaaaaaggtcgggttcctgttagaccgtgggaactgagcagtgggcatggttctgtgcagatgctgcaggagagagtggacaagcagggagcagtgaccactaggaatcacgtggcacgggagccttctggtttgctgtcacgctatctgcagtaaactaacattaggtgatgtagcttggtacagcttagtggtgtgtacttgggttccttttttaaagtgaagatttctattttctcatcttttttttttctttttagtaataattactttgaattttggtgtatgtgctgtggtagttctagctctatcaaaaatggcttatggtatagtctgtccagaaggaaatttggggtactccagtggacaaaagatagcagtttcctaggtccaggctgaacagtaatggccacttggccaggagttttgtggaacacgcggctggctatttggagattaaatagcatcctcttcctccaactcccttttcagtaataacctttctgtagaaaatgcacataggaaagaacgggagatgatggtgaggcaggatccaacagtcatcctgctgtgctgaaataacaatgttaatatttcgataaattcattggtccttttacttgtgtaaata

SEQ ID NO: 2623 - DNA, 644 bp, Mus musculus
  misc_feature (482)..(482): n is a, c, g, or t
  misc_feature (489)..(489): n is a, c, g, or t
  misc_feature (547)..(547): n is a, c, g, or t
tcacgcggggcggcgcggctcgaggtatttctggcttctgttgctaaattggagccgtttgattcttttccgatcagctgcattcctccaaggttagagacaccattccgagcaagaaattagaaccccggcttcagccttatagtgcccttgatagtctcaaaggttttgaaatacaaactgacattgtgtctagtggcatcttcttaaatcaatttttttctgaaaggcctgacatcgaatagggacagagctatgacattcctgtagagcccaagccacactgcccagccagcctggctccagttacagctcttacattcaatgctctcatgcttccagcaggcaggcacagcaatgagggtgccttcccagggacttccctggggggttagagagagttctccaggagtgcatagaaagcaaggaaggggcaatggtgcatggcagaaagcatggctgcctctcccatgttacaggangccccantacgctttccaggcactggttcctgccgatgccagactacatccacttcagatgtatnggtttccaaacatttccagccatttgctgagaattagcatttcaacggacatgctatctgagactgactccagaaatctcttagacttcataaactt

SEQ ID NO: 2624 - DNA, 744 bp, Mus musculus
  misc_feature (470)..(470): n is a, c, g, or t
ggtcgaggaagagtccctcttcccctgtctgtccgcatacaacagcaggatctgttcctagctgtcccaaactggctctcaagagacatgtgaatgtcactactaaatacacaggagagtgaagactcaaccatatggctgtgtgtacggcatgcttcttgagggatcggctccctcaagccaggaacttctgttctaatttcagcaaaagagaactgtctcatggagggctctggcttgtaggtaacagatccgtctatagatagaaaccctcactttggcacttgggaggtagaggcagacagattaggaatccaaggtcgccatgtactccctgagaccttatcttaaacaaaacgaaacacccacattaaggaccaagtcagttttatttgctttgagtcttggctccttgggtgtcaatatcagctgtttatgttttgtatttacttacatgatcctgtgccccnacccatcccaccgcctgtggcccccctctgtaggttcccttatataacaaagtcaaccagggcatggttcatgacttgaatttcaagttttcaagtaactttttggaattctttacttcaaagtgatataaatatccaatgactaatatttaatttgatgagcagtagtcggggacccttatcctttttccttttgcaattttatcacttcgcattaaacttttagaggtttaccatatgtcatctcgccatgactctgtaagtttttaattat

SEQ ID NO: 2625 - DNA, 427 bp, Mus musculus
  misc_feature (85)..(85): n is a, c, g, or t
cggcgcgtgcagcccgaagaatcgatatcaagctagataccgtcgactcgagggggggccggtacccagctttgttccctttagntgaagggttaattgcgcgcttggcgtaatcatggtcatagctgtttcctgtgtgaaattgttatccgctcacaattccacacaacatacgagcagggagcataaagtgtaaagcctggggtgcctaatgagtgagctaactcgacaatctcaactttggcgttgcgctcactgcccgctttccagtcgggaaacctgtcgtgccagctgcattaatgaatcggccaacgcgcggggagaggcggtttgcgtatagggcgctcttccgcttcctcgctcactgactcgctgcgctcggtcgtatcggctgcggcgagcggtatcagctcactcaaaggccggt

SEQ ID NO: 2626 - DNA, 767 bp, Mus musculus
caaacatgcgtctcagcacacagctttgtgggatgcagaaagagcctgcaactgggctcttgcagagctatggatgttatggggtagtacagaatgataagtgccaagagcattaaacagctcttgaaatgcaatggtagggagttaacaccagtcagaataattctcataggcatcaattccctgaagacttgatccagaaagaagtaagctggcaggcttattagctgaaagagtttctttaaagtttttcaaaccgttcacggtagttataattaattatataattttagtgtatatattcatatgcttctcatttctaatcactgcatgtacatttgaaatatttgttttaaaatagaaaggacagctgagagaccttcaacgcttggtgattgcttgctattcacagaaatctaccccagtgggcacttttgcttttgtaatttgcacaggactttaaaataaacaggcatgccaggaaattaagagccagacctgatggtatcactctgatatccctcacgctgctctgctaacatacatgctcgagtgtgtgcagttaccctagagattgcaggtcacttaacttcctcatattttcatattcggaatgaaatcatccaataaaaacatattgaaagtattaagcatgccgtattagataaagatttccccagaataaacgtcaccagggacatggcctccaaagcaaaacagcaaaactgttagaatagggtcacggcgcccttggtgacgtgttgtgt

SEQ ID NO: 2627 - DNA, 617 bp, Mus musculus
gcggtggcggcgcggtcgatggttacagtgggtattttcacatctttttgctggtgttttctgaatcagtgggattggggagagagaaaagctgaggtctgcggaatcacggcctcccaaatcctcacttagcaccccaggcactgggttcagctctcctccctcggttgggatgccacccgtattgtcagtcgcctggtgaggtaagttgcagtccccggagccccaataatccctcttcctagtgccagatctgaagtcttacaaagcataacctattttttttcttctgtgtaccctctgctaatccccacgtgtatgtattctttcttgcactactcatttttgttaagtgtaaagacttagaaagctagctcaagtaaggctggtgattagctaatttggaaggacacttgcctcaggaagccctgagttctatccacagcaccatagaaaaccagatgtggctggccacatctgtaaacccagcattcatttggaaggtgggaggcaggaagaagtcatccatagttacatagtaaataacaagccagctcaggtctgtggacctgcccctcaaaacaggcaaaccaaaaactcaacaacagaaagcctgt

SEQ ID NO: 2628 - DNA, 733 bp, Mus musculus
  misc_feature (245)..(245): n is a, c, g, or t
atttaaagctgactttttaatgattctgttgagtctctttttttccccccttcaaaaaaacatttttttatttgatctgttgcttgattttagacttggccttagtagattacagtttcagttgtaatttatttataagatgccatgaaaagataattttttcccccaaacaacgaggctttgtcttggtcccgaactgtttccagaggaaagagtgtgtgtgacctcgcttcagaagagccttnggttctattgagagaccggacaggcctgcttgtatggtgtatcagggactattgaggaccctgatcccagaagtgctttgaccatttgtcaaagactgataggtagattctttggggtgattcatgtaactagcagttgttggaatgttgagatgaatgcatcattagtatgagtgtaatatattttgcagaaaaataataaatagatgattcccagaaactaatgaattttttaaaacttattttaaaatttctatatattgttaattgtgtgcatggcatgtgtgtgtcacatggcatgtgcaggtcagaggacaatgttgtggcacctcttctcctagctttaaacgggttctggggtcagacttgtattcacagagctacctcatgaggccttgattttacttttatttttacatttttcggggggactaagtctcctgtactccagctgaagctgttcttgaactcctgggttctttctgcct

SEQ ID NO: 2629 - DNA, 760 bp, Mus musculus
gaggaaaagtgttctggaatcttcctaatcattttcaccacttaacagcagagcaagtgagcctcagggttagtgacgagccctttcctgcccttctcaaccccaaatactctactgcagtctttgaagcctgggatctgagacacaggagctgcttaggaatgtatccattctacagctccatttaaaatacagataagctgttcatttgcatgtcaaaatctccctgcccactaccatctagatgagttttaactagccagcaacctgaagggacttccggggtccagctctagtgaccctgtatgcagaggagcccagatgttttgaggaggtaccaaaccagagagtggctagaagggtggaagaaaggggcccttccttctatctttgtctccctgtcttcatcctcagtggcccctgacagccctttctcctatatctggcctcaggatttctccccttataggaatggagtggttcttccaatctagtaactctatacatatattttattggcaaggagtagagccaagctagacccaattttagcaggtagtccaagaagtagaaaagggtcttccctttgaaagaatgaattatggaacaaaggaatgtctaggtgcatgataagacctaagaactgagtggaataaagctagagtttaaaaggaacacttgcattctcatgcaaaacacattctatttcagaacaagtcattagagagttagaataatgactgcttcaacagaggatctc

SEQ ID NO: 2630 - DNA, 608 bp, Mus musculus
accgcggggcggcgcggctcgaggtttgtgactcaaacttctgtgctgggtgaagtacccattgtgattgtggaagctagaattcaatttgaactcaggttgtttatggggggagagaagctgtggcataatgtatagctctgtagtcttctgtgtagctagactgttaacctacgattgtaaactagctgtaaggatttcccagtgaaatcagatttggaaagaaaagagagatagttctccgggatgcatagattcatgatttatctacttttgaaatgtgggcttcttcatctttacgttctagactccaattttgtccaatgtatatagaatctccatattaaagaaatattcataatcagaaagcttgaatattgtttttgcaccagaggagaagtgaggaaattcggagctatacgtgtgtgcagagggttgctacctatgggtttacgcttaattttaattgggagaaagtgagtgcttattgtaatggagttaattttattgataataaattatacaccatgaaactgctcttgggctactgtagatttgtatccttggtgaatttggggttcccatcggattgaacatacactgtatat

SEQ ID NO: 2631 - DNA, 678 bp, Mus musculus
ctcacgcggctcgaggcggctcgaggactgacatttccttcataagagagaaaatacagagagggtgaatgaaattcttgttcatatttatgactagactaactcaaaaagggcttcctttgttaagactgacatctgtcctcaaagaagctatcactgcagattgtagtggttggttgttttttgagagagggtcttgctatgtaatggagaatggcttcaaatttggaatcctcttgtctcattctcccaagtgcggggactacagaggtacgccaccttagccaccctaaaggattgcattgaacagtataatctggctctaatggaaagtctgtatgggagttagatgaagagtccatcagggctgcagagatggctcagcgatgaaaagcagtcgctgctcttgaagacaactggagtccaattcctactgcccacatggcagctcataaactctgagaactccaactccaggggatccaataccctttcctggccagcgtgggaaccacacgtgatgcatgtaaatgcacacagcaaacaatttttatgtcttttttttttttccttcaagagataaaagtctgaccttcatcttcaaagctagttccggggaggctaaggagttccaggtgtccaaagccagcctaaggagtgcagcaaaacttggtctca

SEQ ID NO: 2632 - DNA, 809 bp, Mus musculus
ctcacgcggggcggcgcggctcgagtactttccaatctggcagctagacctttctagggtcttatttaatgagccaattttttctgttgtcctctatgaggcagcccttggtgcacaagcctttgcttttcaggctgcctgcagaagactaagttctctcccgtctacacagaacagggcccactgacttggttaatttctttaatatttttgtcaaaagggcaatgggagggtttgggccgtaagccacagctgctgttagactccaaccatacaagagtaggtatgagtcactgacaacttctacagtagtaatttgcattcccatgtaagtcagcagctaagaaaaacattccttcaaagctatatgttgtacaaaaattctaccagaacctcataggcaaagccattgctagctctgtcattccgaatactcagtctagccaccaggttgctgtgatcacagttccttcctctactcggctcctgtggattctcaacgctgttctcagcatcttccccagtttctactcaggttctcctgctcctgtttgtccttcacatttctcgctgtgtaaccagtcataaacctgcgcagtctgtcagagttccacacacatgaccgtgatttctcactgtgtaaccagtcataaacctgcgcagtctgtcagagttccacacacatgaccgtgactcctgagaactctgtgtactgacactgttcctcttagctttctctgtaccgtctcgtcatccccgagtgccatctaattaaaccctgttcctctccacgttctcatcaggttggg

SEQ ID NO: 2633 - DNA, 688 bp, Mus musculus
gggcggcgcggctcgagacaatgcttgttagaccaattcttaccaattctgagcaagccggtggctctacttctgggtaagctgcctcttaaaagtgcctttgatcccagtagtagattcaggctctacaggagccttccctcagcagctaaaaccaattgtctcctctactctttgctgcacctcccggaggtggtctccatgtggcagtgatgccctcatcacccttgtgaccaccgctctgaatgttcaaaataagcatttcctgtccaagcaaatccctaaactccctcgtcctcattactcaactacctcagtctgacaactcaaggcacacaagcacctacttgcctcccaccatcctttactgcccttgtctttgtggggttggaacaaatgcaaactcctcagttccacaacccaaaactgctctttctggatcgtcttctccagtgacgttggctccctacaagagcgaactctccatatgggtcagtccctgtaggacaagccaggactatgctgtgcagtcaaatgccaggtttggagcatagcttaagaccgcagagagtaaggacttgagtggtggtggtgtgcagtttgagagagctggaatggacgtctctgctcctgccctctgggcgggtcgggtgatgacttctagatgcactccttaccctggagggaa

SEQ ID NO: 2634 - DNA, 587 bp, Mus musculus
ctcacgcggtggcggcgcggctcgagaccttagcacaggactttgtttaaaggacccacaactccaggctcctgatgtgccctgaattcttagattatcaactccctgctccatctccagcacctgagcttctgcttccacccctgacagcagagcccattcctggtgaccagattggcccccttggctgaattttgtggcagctcagccctttgccttttcaggctatggatcccatgtagcctgggagttggcctcctcagtcacccaggggtgctagccagctgccccttccgctagcaggcctgtgaggggtgatctataggcatgggggctggtgctaagagttacatatctattactccttctcctgctctctaccatttgcacagtatggccattactggtagccacagattcagccaaggctattgtgtgtctgtggaaagaaagctggaccaaaatagctgctgctatgtcctccacctgcacctgtccatgtgagccatgcggtgtgccataacagagtctggaactccaggctcaggcttgggcctctctactaggaggtggtccagatgtaccag

SEQ ID NO: 2635 - DNA, 827 bp, Mus musculus
gcggggcggcgcggctcgagcacagtctctcttgtctaggtaacacatggtgacaacatagcattgaactctccactctgagggtgggtttccctccccctggcctcttctgggttggtcaccccataggacagccacaggacagtcactagcacctactgaaacctctttgtgggaacatgaagaaagagccttgggagattcctggctttccattagggctgaaagtacaacggttcttggttggctttgcctcgtgtttataaaactagctactattcttcaggtaaaataccgatgttgtggaaaagccaaccccgtggctgcccgtgagtagggggtggggttgggaatcctggatagtgttctatccatggcaaagtggtggaataggaattaagggtgttccccccccccccaactcttcctcagacccagccactttctatgacttataaacatccaggtaaaaattacaaacataaaaatggtttctcttctcaatcttctaaagtctgctgccttttccagggtaggtctgttcttgctgtctatgtcttgagagcacagactaacacttaccaaatgagggaactcttggccatactaaggctcttctgggctccagcactcttaagttattttaagaattctcactgtggctttagcacacccgcacccccaagtgggtgtggataatgccatgggcagcagggggcactgttgaggcgggtgcctttccaccttaagtggcttatagtatttaaagatgctaaatgttttaatccaagagaagcactgatcttataatacgaaggataagagat

SEQ ID NO: 2636 - DNA, 482 bp, Mus musculus
aaagcagggcctgacccagcttttcctgcaaccacctgagctgaaaatgcttctcgtatatactcctctgctaactctagccaataactcacggtgcaggatcataacaggccagttaacttgtctggacaaactctgggcttgaatgatgctccaagctggcggaggatcaggcagaggctgggcttggctcgcacttgcccctccgttggtatctcctcattctccatctgctgcccggctctttttttcctcctccttcaagccctttattaataaaccatacgtgggaattcatttctccactttcaaaagaactgccctaagacaccccagtaaactataaaacacagtaaaataacacatatcaaaactcaagagtgacacagggaaatagatcacagaagaagtcactcaatagaaacggttctaaaacaaaggtgagttttcaatatacataagccagagaaagatgaatttga

SEQ ID NO: 2637 - DNA, 753 bp, Mus musculus
ctccacgcggggcggcgcggctcgagctgaaaacatgtatcacgctgaaaacaggtatacacgctggaaaaaacactccaacattccaggctccaagctcaatgttactgttgtttgacaccttgaaatccagtctgtccactctgtgaatattagtgtggtgcccttaggacagactttggtggctaaggtggggaactaaaacatgcaagttgatcagacttcagaagtcttaagttacagtgatgacacaggttctcggatggggagaggtcagctttcacaggggagaaggtagggaaagttagttgtcttagtctcttctgctgctataacaatgctacatacaacagtaaactatgaagaagtttatctcgctctggaggctttggaaagtagaataacatgcagtgtcagctaagtggcaggtaaaagcgccggaaactgtctatcattttttatcgggaacctactcttgtggtaacaatttgttcctggagggcggaactctagtgtcctcatcacctcttaaaggacccccttaggaatgttgcatgcatactgttaacagtagcaaatttcagggtaagtttcggagggaactttgaaaccatgctaagagtccaaagcagtggatcaggcagtggagaggactttagaaaaagtgtcagtggggggagtggcagaaaagaaacaaaggctgcgaagaaatgaggtgatttgtttctggcagtttctactcttcattaaaga

SEQ ID NO: 2638 - DNA, 717 bp, Mus musculus
gcggtggcggcgcggtcgaggaaccgcagagcaaatgacacgagcaaactttgtctcctttatgtttaagggaagaaaacatcctgtgcctttgtacatgtcgttcaggaccacagagcaaactggaaggatgcattccatctggccaatggtctagaatgaacggcgtttctatagatctcaagcccagcatcctggggatggcttcatggccatgaactcaaggggtgcagcagtggctgaggtggcgcatggagtgatggagtgagttctcagccagaagggaaaaaaaatccaaagggaagccccagagaatacagcagctgaagaaaaagcaaagcaaagcctgaaatgtgctcacagcagcctgaagcaatttaagagagaatggggagagggcttgccggagatctaggcatggaaattatttcccccttttaatgcagatggaagaaaatgagaaagctgcactcccaagaggaaaaccaaccaaaaggaaaagtctcctagcattcccagcaagacgtgcctgtgtgtgtacaaacaacttgcaaaggaccacagcaactctggataacgctggtgtttcctcctcatctgcctttcagtcctcctcttaccagtctgcactacatgcagaaaccctctgtgcatgtctaaggtggtacacacataggaacggttcatgcagatgccaactctgtctgaccctgtctc

SEQ ID NO: 2639 - DNA, 554 bp, Mus musculus
cttgaaaaaaaggaccacgttcaaaattgatccaatcagtcagtagtgatgaatcattggtatgtaatccattacatcaaaataatgtgtcttacaagagaaaataaaactttctcttgaaaaccccacttgagagactggccagcatgggtcacctcaaagtctgcctggctgttgtgcaaactcaagccatcttggcaacttagaagaaccctgccaaagataaaaaccactgggaaagtacgtagcttagtgcagagggtttgcctgccgtgcatgaggcttaggtttaattcccaactctgaaaaagaaagggaaggcaagagaggggaagggaagggaaagaaagaagtagaaaaagaaaaagaggaatcctagatttttatgttgaaaaataattttagaatatttaatagaactttggtacctgataaaattggtttatacaaaggtactataaaatactgaatgagtttaatacatctatgtattgcatgtcaaaagattaatagattcgttcatcttctttgtaagaagcaccgtagtacacact

SEQ ID NO: 2640 - DNA, 372 bp, Mus musculus
atgtaaggtggtgacaatgctgtctgtgcactggcctttggtgtccatgtgctgttggggcatgaaggtgtatgagcgtgtggtagtcaccacataccctttcaataatgctcatccttccatggtctaaagatggccacagcaaacatggcaaacaataggtgtaagttagcacaatactaaggtttcatctgatgtttgagagaggggtgtgccatattggaaacatgtattccacataggcaccccagaagaacagtgtgatgtgggcgtagaacatgtgtttataagtaaagaggaaatcaggtggcgtgtcatgatgaagggaatgtgtggaacgatgtgtccgaatgacatgcgactagaaaagag

SEQ ID NO: 2641 - DNA, 536 bp, Mus musculus
  misc_feature (424)..(424): n is a, c, g, or t
gtttctgcggaaaagaacaggcaggaaagctgctccgagcagttagagaaaagccgcctcacactgtgtttcacactcgggcagtaagtatgtaacgccggcctctttttgggtcatttactagattaggactattacatccaaggcactgggggattctggtgggctccaaattagctttactgattgaacatccacagagatggaggcatttaatacaaaaccaggaactccgaatccattgctctttcctcctttgctttcacttcttaagtatatgtgttctgaagttgagatgggagagatttgaatatagaatttttattctcaaactgtttagtcatctaaggcttcattgtacttcggggagagctataagtaactcacctttaaaacaacaggctctgatttgctgaagaggttnggtattttttaaggtatgtctccctgtttgcactcagggttaaagtggtcagactaaatttttagaagaaaacagaaattcaggtgtgtgttcattataggttattcagcaa

SEQ ID NO: 2642 - DNA, 660 bp, Mus musculus
caccgcggggcggcgcggctcgaggaagtgcgctgctcaggaactacccggggctgcagattcccatcgtctggaggcaggaaaagctgcctgcagtgtgttcgtgtgcctgtacagaattctcttgccaacctttgcagcgagagatagtagctaaatgctcagaattaaagagcaacccccaaaacctggaaaagagtctaagtgaacaaagcctgcctggaatggaagagctctgagtgaagagagtcagcacagagaagcaaacagaggaccctgtaaggactacttatcaaactgtaatcaacaacaaccattaacaaccaacaaccaaccaaccaaccaaccaaccaaccaacaatcaacaactccacctctcagggcccttttttatatattccctgaaaactttccagaattccaaacaccacacaatcgcataaaactgtcttcaagtgtcagaatcatgcccccaccagagctcaaggaaaatcagtcagctgcttcgtacacgctgaagcagccccatgtcccacacctgggaataaaatgaaagcacgttcttttctctgtgtgtgtgtgtgtgtgtgtgtgtgtatgtgtgtgtattttaagaaaccaaaattcttaccacaaaatgatatctgagtgtgctttcta

SEQ ID NO: 2643 - DNA, 817 bp, Mus musculus
gcggtggcggcgcggtcgagctgggttcaggagccgtgctggatgccaagtcggaggtcacgggccagcttatagattttcagtggaaactgggcatggctgtgagctctgacagctgcagatctctcaagtatccttacgtggcagtgatgctgaaggtggcagatcactctggccaagtaagcagcaagtccatcgagatgacaattccacaatttcagaatttctacaaacagttcaaagaaatgccgctgtaattgagactgtgtgaaaactgattcgttattctaaagtaatggacccttccttccaaatgagaactgcatatggaccacaggacatctatacagtgaaagctgtgcttctggggctggagagatggcttgaaggttaagagcactggctgctctctcagaggacccaggttcaattcccagaaccacatggaagctcacaactttctgtaactccggttccagggacccggcgcacatgcaggcaaaacgccaacgctatagaataaaaataattaaaagagaatttcacttctagtttttaaaaacaattttttaaaaaatcagataaacatttattttagtggtgaccaatacttagcctagtcagtgagctaaaagtggctctgttgaccactggtgtgtataattatgagtaattatatcttcataaatagatgactagttctgctcgagccgcgtcatttggatgttttaattgtaaaagaaaagatcttggctgatatttataatttgtatcataagaatgtctccagaattgtcatgcagtttataacaagaag

SEQ ID NO: 2644 - DNA, 767 bp, Mus musculus
ggctcgagggaaatttgcatttccatacctttttccacttagagaagaatctcagtgagggaggtggcccaggaacagcgcttccccgttggccaccagttcctgtgtctgctcgagactccaccaaaccattggcttgcacatctgtcctgcaaagggagcagatagaacccagaactccaggccctgccccaggagtgaggctcaggtgcactactgagctcgacctgttctcagataagtcagaaatgtgaggtaggtaaaaatgacttcacacagcacaagagaaaaaggaatttaaaacatacttgttttgtattaaatcccatctcactgtaacatcaagccacaatatcttacctttcagccttcatccaatctcccactgctttctaatgttgacccggctgttagcgtagcccatggtcatggcaaatcctctcacaggtcagagcagccatgaactgtgtgccatctcatcaggaggatcaatcgcatcagcaaaggcatcctgatcatgttctcagagccagggccagcccagcctcccctgccatcagtattgctcacgctctgcacaacacatttgtacttggttttgtctgacagaacatagaatcagtgttctcttagatgactcaatgtgaaaagcgtaatgtgaaaagtacacacctgatcgtggttgtaaaatccatttaagtgttcatgcaacatggtgagttttaaaagtgaagtgtgctgtgatactacaaccaaatggctcaaag

SEQ ID NO: 2645 - DNA, 414 bp, Mus musculus
tccccgcggggcggccgtggttcgaggtggccctgttcccagagctgagcctgccagggtctcagctgagtggacaacataggagaagccaatctagagagaccatgatacgtgcagagggtgtgagaggaagggacgcatttctcctacgagggactctagaaagcagtcagggttccctctcccttggctcacttctgaacaaccggggtgctgggagaccctttgtctgagggcagtttatgtctggaaatattgagattttttttcttttccagattctggtattcttcttctacccaaaattacatgcactaggccacaaataccagggattgtaggtgatatggggtatatactgaaaccctggctctctgcatagagtttagaatcaccctcaaccacgtatactgt

SEQ ID NO: 2646 - DNA, 673 bp, Mus musculus
ggctcgaggttcacaacgtccagctttcgaagatcctccgccaagaataagaatgtagcttgcacaactggcaaattaagaaaatatactaggcagagtaaagtctatttatttattttgttttaattatataagccctaaaaagctttttagcaccctggagagtaaaaaatataaagtcgtcttcaacacacgctaggggccaaaagcttctttgttaggtgattagaaggggggaccaggcatggtggcacatgcctataaccctagcaccctggaggcagaggcagggactaaaagttcaggcctcgactgggctataccgtggggcccttgttttcaaagacttgaaagctgtgtctggtggtagcgtttgccgaccatgtgccaggcactgttgccaatccccagcactgtcaaacaagatataaaacacaggagaaaggctcacagtggcttgtgggatattagacgatctcattgagaaccgtttcttcagttctgctttgccaaagtacaggcaattcttaacctgtccgtcagcattacagactgacccagcttacggtgggtcggaaagcaggctcgctctgtttggagaccgggaattcccctacacttcatattctctgaagctctaatgtgattcaggcatcttgagaaacagaccaaa

SEQ ID NO: 2647 - DNA, 572 bp, Mus musculus
ggctcgagaaaatgggcaggctgttctagagaacacattttctcagaaacataaagagctatcagttttattagtggaaatgaaagaagcccaggaggaaattgcatttctcaagtcacagctgcagggcaagaggcccgagggggactatgaggtcctcgaccgtagagaagtgcagctgatggagagtgaaggaccgccctcagttacagcaggagatgtcctctgtgcacccagtgatgagagcagcggcccagcagctgaagaggaacaggcaggcatgaaagatcggcatcgagcatctgaggcaggacctctaaatgatgctggaatggaactgagctccccgaagctggatggcgtggacaaatccctcgcagtgtcccatgtctgtcagtgtcaccagggcgaactggaaaggctgaaaactcaagttttggagcttgagacaagccttcatacagcagaggaaacttacaagagaaacttaagtgagaaagtgaaggaaattagcagcctaacccagcttagcgaagaggtcaaagagagcgccgaggaagcccgcagcacgg

SEQ ID NO: 2648 - DNA, 511 bp, Mus musculus
atatatagggtgtttggagctccccgcgggggcggccgttggctcgagctgaggacatcttggacacttgtttgcccacctgagggttcaagagcctttcttgctctgtctcagtatagggactaaggcatccccagattcttcatgataggtttccttttcccctacttgaccttctattggtacccatgaaaaagcacaaggtcctagctccctgtagatacacactccagttctgttgggtagactctactcctaacaggggtcctagagggttctctggaggatgggaaaggaacagtctcatgtcctgccaaatagtagccagcagttgccttacccctgcctgctggccatgaacccacattctcacggaaagggctttcagagacccctggtttttctcagcactgtaccattttgtgtaggaagcaggtcacaccttgtagccaggtctaaatggaagtgagacagtgaattctctgtggacttttttggtttgtgggggggt

SEQ ID NO: 2649 - DNA, 414 bp, Mus musculus
cggctcgagaatttctgcagttcatttcttttaatgttcttgtctgcaaaaactcaggaaagtgattgtgatttgtacagtacctcaaaggaatgtgttaaaagcactatgtactgctgagagtaatagggtaggcttcaatgttactttatattaaaatgtatgtttacctcaacaattggagaatagcaaggaaaattattttgaatgtatccagaaaagaaaagaaaaatactgaagtgtgatacaactgaatatttacagtttaaaagtagaagtggaaggatttttttttttaaagttctcttactaattatggggaattattaaccagagcagaacaattactgaagagttcttaatgcattgctctccatgatgattaagtggaaatgttcatacgaacttcctctg

SEQ ID NO: 2650 - DNA, 531 bp, Mus musculus
ggctcgaggatccccggcagccgcgagttcgacgtgagtttccgatccgccgaaaagctagccctgtttctccgcgtctacgaggagaagcgagagctggaggactgctgggagaactttgtggttttggggcggagcaggtccagcctgaagaccctcttcatcctcttccggaacgagaccgtggacgtggaggacatcggacctggctcaagcgccactgcgacgtgctggccgtgcccgtgaaagtgaccgacaggttcgggatctggaccggggagtacaagtgcgagatcgagctgcgccagggggagggcggagtgaggcacctgcccggggccttcttcttgggagcggagaggggctacagctggtacaaggggcagcccaagacgtgctttaagtgtggttcccggacccacatgagcggcacctgcacgcaggacaggtgtttcaggtgcggggaagaggggcacctgagcccttactgccggaaggtcatcgtgtgcaacctctgtggcaaaagaggac

SEQ ID NO: 2651 - DNA, 753 bp, Mus musculus
ggctcgagattaaccactcattcattgacctacctgccccatccaacatttcatcatgatgaaactttgggtcccttctaggagtctgcctaatagtccaaatcattacaggtcttttcttagccatacactacacatcagatacaataacagccttttcatcagtaacacacatttgtcgagacgtaaattacgggtgactaatccgatatatacacgcaaacggagcctcaatattttttatttgcttattccttcatgtcggacgaggcttatattatggatcatatacatttatagaaacctgaaacattggagtacttctactgttcgcagtcatagccacagcatttataggctacgtccttccatgaggacaaatatcattctgaggtgccacagttattacaaacctcctatcagccatcccatatattggaacaaccctagtcgaatgaatttgagggggcttctcagtagacaaagccaccttgacccgattcttcgctttccacttcatcttaccatttattatcgcggccctagcaatcgttcacctcctcgtcctccacgaaacaggatcaaacaacccaacaggattaaactcagatgcagataaaattccatttcacccctactatacaatcaaagatatcctaggtatcctaatcatattccttaattctcataaccctagtattaatctctcccagacatactaggagacccagacacctacataccagctaatcc

SEQ ID NO: 2652 - DNA, 765 bp, Mus musculus
ggctcggctagctctccatagacaggccttaagcgccaagctctatctgccgattaatggggagtcctaagacagcaatgatttttttaaagagccttctttaattgacagttctcaaccacgggtcttaatgtccttcttaagcgcgacgtagaaacagcctgctggcttccgagtgccacttcttgattcaggaactttccagtgtttcgaagcaggctgtttactgcaatccattggagggaatcatcttgaaaatagcatgttacacacggggaactagcattgccaaggagccgccaagcatcagaaggcaagctgtgtgcttcagccaccgctccatgaaactgggcttgcttgagccagctgctcagtggctgcagtctgtcccatgctccctactccagtgcccacaacactgttggccttaaacactaatcctcacattgtttggccatcgttaacacttggcatttatacttaagtaatccattttccccctcggaaaagcttggaagcaaggccagaacttggttcccacccatccctgtttgaagtttactgcacagtacatgaaactttcccaacttgggtcatgcccgtgatatcagacagaccagtcagcttggtgggggaggatgattggcagccaggtagtcagagcagctgatcgaagctctatttttaaaccatttgttaggctgttgtagacagagctttattgccctgggaaggatttttttttttaaactcgccccaaaaaaa

SEQ ID NO: 2653 - DNA, 759 bp, Mus musculus
ggctcgaggcggctcgagaaaataaggacatcctgcagtggggttccctcgtattatgagttgagaatgggtgaagattaagagcagagtagttgccccatgctccctttgtttggtagtgcccgggtctgctgctccatttttaatagctggagctttttctttggggtgatgctttaacaaaaaggaaaggggatgtagtggtcttgagctccacttaagcagaaggcgtataaggcctttcctgggaccaaaggacttggcagcttgttactgactgcgccaccagatgtccttagtgctcaaccttgagttcagaagcactaactaaagtttccacttttatttttaagagcctaagaaagtgtgtatagttgtcttctggctggcggtgtggagaccagtattgcctctgcccttgctgcttttcctcctgaagttgaagttcctgataaagagaaatgataacatacctgtccagtggtacccaaaaacaccacagtaagagctttggaacctcgttctatagttgacctcaaagtcaactggatttggtgctaaaaacagtagaccattccacatgattaagttgtctaatggttttgtcacattagagtggtaccaggttagcagcactggcctgctgagtttgaggaagcttggagaccccagttcatatgccgacagtgatgtgggttcattctaagcctgcacattagaacaagtccagtgtgtagtgccaaaaatagtcaaaggggc

SEQ ID NO: 2654 - DNA, 481 bp, Mus musculus
ggctcggcttccacaaacaggcaggaaagatcaaagcatttcatcacagtccatatagtatccaagtcaccagaggtattaaatttcttgtagctttgccagtcccaccaatctgtattttgtatctttgttaggtgacactgtacccaagtcagctgagtgtaggcaaacctgttcccacttttgatttatgtgtttctgattattaataagttagttgattttcttatagacaagatgtacccccagcagctattactggcagcaaggctctgcctccactttgtcagaacctgcctaaacagtgccaaaagctttgggccaaagaggcaattgcaagtcactgagaggtgcttcctacctgtgatggttgctatccattgtcagtctgactgcttttgaaatcactcctaggtagacatgatctgggtatgttctgtgacagtgcttccagtagtagcattatacaggtgatagtctc

SEQ ID NO: 2655 - DNA, 822 bp, Mus musculus
ctatcactacttgggcgatattggagctccccgcgggggcggccgcggctcggacttagttgctggttgttgttgttgctgttgtctttgttgttgttgcctgcttgtaatctcctggatggccagagggaaacactgtggggcctcaagctggcagcctcctactcctaccccttttcatttcctgatggcaagagattaccttgtgtgtcccttttggacctgcccttatctatccaatgagagcacttggcacaacacctgtaaactccgggaagcctaggtattcttttggacaacatattgctgccagaaacagtggcagtactatatttcccacagttaacaccaggcatttcattattgtgctcagaaagtatcatatttcttacagttatcacatggacattttgaaatctgaggcttttagccacttggtcacaatttctttgtaaatggctgaattcaccacaattaaaacactgggcatttttatatccgagacctagctatagcttatactatggtattagcatgatgtttgtgagagccaatatcagttgtgtcccttatccactcatccattggcactaccgcggctctaataatctaataacactttcacattgtgcattagcattctcaaatgtcaccatctttaacaacaccctgtcttggaatcagggtcttatatggctttgtttacagcctgaaacaaatcttttgcaagaaatctgtgaaggcttccccagagcttatataatcttagtaaaatgtggctctttccttgggctccttaactttgtccccaagctcttaaag

SEQ ID NO: 2656 - DNA, 708 bp, Mus musculus
ggctcgaggcggctcgaggcggctcgaggagcctcaatattttttatttgcttattccttcatgtcggacgaggcttatattatggatcatatacatttatagaaacctgaaacattggagtacttctactgttcgcagtcatagccacagcatttataggctacgtccttccatgaggacaaatatcattctgaggtgccacagttattacaaacctcctatcagccatcccatatattggaacaaccctagtcgaatgaatttgagggggcttctcagtagacaaagccaccttgacccgattcttcgctttccacttcatcttaccatttattatcgcggccctagcaatcgttcacctcctcttcctccacgaaacaggatcaaacaacccaacaggattaaactcagatgcagataaaattccatttcacccctactatacaatcaaagatatcctaggtatcctaatcatattcttaattctcataaccctagtattatttttcccagacatactaggagacccagacaactacataccagctaatccactaaacaccccaccccatattaaacccgaatgatatttcctatttgcatacgccattctacgctcaatccccaataaactaggaggtgtcctagccttaatcttatctatcctaattttagccctaaacctttcttatacctaagcacgaacc

SEQ ID NO: 2657 - DNA, 817 bp, Mus musculus
ggctcgaggaaaaacacacccattatttaaaattattaaccactcattcattgacctacctgccccatccaacatttcatcatgatgaaactttgggtcccttctaggagtctgcctaatagtccaaatcattacaggtcttttcttagccatacactacacatcagatacaataacagccttttcatcagtaacacacatttgtcgagacgtaaattacgggtgactaatccgatatatacacgcaaacggagcctcaatattttttatttgcttattccttcatgtcggacgaggcttatattatggatcatatacatttatagaaacctgaaacattggagtacttctactgttcgcagtcatagccacagcatttataggctacgtccttccatgaggacaaatatcattctgaggtgccacagttattacaaacctcctatcagccatcccatatattggaacaaccctagtcgaatgaatttgagggggcttctcagtagacaaagccaccttgacccgattcttcgctttccacttcatcttaccatttattatcgcggccctagcaatcgttcacctcctcttcctccacgaaacaggatcaaacaacccaacaggattaaactcagatgcagataaaattccatttcacccctactatacaatcaaagatatcctaggtatcctaatcatattcttaattctcataaccctagtattatttttcccagacatactaggagacccagacaactacataccagctaatcactaaacaccccacccatattaaacccgaatgaatttctat

SEQ ID NO: 2658 - DNA, 773 bp, Mus musculus
tggctcgaggaaaagcctaacgagcttggtgatagctggttacccaaaaaatgaatttaagttcaattttaaacttgctaaaaaaacaacaaaatcaaaaagtaagtttagattatagccaaaagagggacagctcttctggaacggaaaaaacctttaatagtgaataattaacaaaacagcttttaaccattgtaggcctaaaagcagccaccaataaagaaagcgttcaagctcaacataaaatttcaattaattccataatttacaccaacttcctaaacttaaaattgggttaatctataactttatagatgcaacactgttagtatgagtaacaagaattccaattctccaggcatacgcgtataacaactcggataaccattgttagttaatcagactataggcaataatcacactataaataatccacctataacttctctgttaacccaacaccggaatgcctaaaggaaagatccaaaaagataaaaggaactcggcaaacaagaaccccgcctgtttaccaaaaacatcacctctagcattacaagtattagaggcactgcctgcccagtgactaaagtttaacggccgcggtatcctgaccgtgcaaaggtagcataatcacttgttccttaattagggactagcatgaacggcctaaacgagggtccaactgtctcttatctttaatcagtgaaattgaccttttcaagtgaagaggctgaaatataataatcagacgagaagacctatggagcttaaat

SEQ ID NO: 2659 - DNA, 653 bp, Mus musculus
ggctcgaggcggctcgagctggaaggaggggagggaacctcgatgaagccagtacaacaacagaagagcccccccagctgccagggcaccccagacccccactcttcactgttggtgtgatagacctaagaaccacattagcaccctgccagcctaccagcctctctgtgcacagcttctaatgttatgatctagctagatttttatttaaaatatgaaaaactgcttttcccaagacgttttttaaaaggaaaaaaagctacaattttaatatttgacatatttaaagtttcaaagcacacttgttttggcttaggggaggggcagggtggggtcattctttttcagtcttaatttttaaatatctgatcattttatattgtccgatcatttcagcacctccaaagggtcctaggatattctgcctctctcttcaccctgtccccagacgggggaacccgtgggtcaggcgtggataagcctgcgagaatacaccctttctccattcactttctatttacaaattaggaaagcaacctttcagtttatatatatattttttttcctttttgatacctcagtgctgcaagtatcatcagagaggctatggaagagttttgtgttttgttttttgtttgttctttttaacttca

SEQ ID NO: 2660 - DNA, 800 bp, Mus musculus
ggctcgaggttgttgttgtttttaagaacataaaatatggtttgttacagaacactaaagctagaagccagacctttttccccctagttctgagtgaactcaagagttcatgtgtgcaagtggagcgccatctccagccctcagagcagtctctcagtggttctttgctgttataagtattaatattttctaagaattcataataaggtgctattcatatacatcatactataagccaactgtcagactatctagtcttcttagtcctaaatcaacaaattttaccatgtcatctccaaattttgtcataggatagacacatttttttaaaaagttggattcaaaacacgtttttcttgataagatacacttcactgaagcatttaaatagctacacaccctgtcatttgttaacagcaggtggtatttaggccttgttttactgtagtatgtaggatataaagtgtatttctttcagtgatttctcagtgcataagaagtgcataagtctcagccgcctgggcattgctcagcagaaaggaatctgcagatggtgacgtgacttgtccgtgatggacatgtcacggagtactgcgttcttacgatgtcattagaagcaccttgtgaaagtgtaactttcgtggaacaaaacaagccatttgaaaaggaaaacggtattttaaaatggtgattgacagagaccccttccctgaccctgtattatacagtgtgctaatacttaacttaatttttgtttacacttctacgttttaccaaaataaacgttacccttgtgttgt

SEQ ID NO: 2661 - DNA, 799 bp, Mus musculus
  misc_feature (650)..(650): n is a, c, g, or t
ggctcgagggatgccacccaagctccttcatggggttcctctgcttcctcttctctcccctccagcatggcacgcccacgcgctagggagcccaacacacatccagactgaactcaagggcccaaacccgagcgaagggttctgtactttacagtccagcacatgcccccacagcgttacggaattgctcttagttaattcacgacaaggtatggaaagcttatcctaggagccctcaccacccaccccctcttcgcaaagcttttacttttacccaggaaactttcgggtcaagctgcacaggcacaggcgctaagggagttccagatagagaaatgtcctgtgtgacgcgctcctagcgctcctcacagagctagagagcgagtgggaagatgggcagaaagaaagggaaatatgtgcttgactcgagactcttccctccaggtgggaatccatgcttctgatttgggtggggcccccccagagggctacccctactgtttgcatgcctttatcatgataattaaatgttccgggcagattcacctccgggattccaagcatgactgtacatcttaccttattgaatggaaagctattttgcatctgttgagcccaatgtgagctctgggttctgccacatgctattnatttaccatatcacattttaaattctcttatgtaattagccattatgctcttctggtccttaaaaaaaaaaaggtggacatacataaagaacctagagacaagaagtatgttcaaatctaataattgcggggccaaaccccggccgaag

SEQ ID NO: 2662 - DNA, 756 bp, Mus musculus
ggctcgaggcggctcgagaagaggctgaagtttttaagaggcagctttccaactttgcacacaaatggaaggtaccatgaaaatcctctcatccgaaacactcggcagaaacaacctgtcaaatcaaaaggactaaactgctgcccacgttgatgcgctctgcgagttacctataagtgttttgttttcttatacttgaaaacacttttacaatattatgttggtggttcacttgcacggcaggccgaccccctttctatattttattttacttttttagtatagtggtacttaaaatcactggttcacttaaaaaacaaatgttaaactctactaatgtacaaataagctgaaaagttgcattttatgtgtatttttgccatagcaggtactgtatttctcatgctggatttcaaaaaaaaattatatatatatatatatatatatcaaaaacaaacaaaactgaagggtggtgttttctcagattgtgacaggttgattggtaaggattaaagtcgtagtcatttcattaaaactgagagatgatgtaatgcatatataagagttttctgaagggttttttgggcttttaaacagcttattttgtcttttttttagctttattcattattttggaaagatatgatggtattatgtgcaactcagttgcttacattataactacaaaaatatttctgagttcctggaaaaaaatgaataaagactataaatgtgtttggctgctaaaaaaagaat

SEQ ID NO: 2663 - DNA, 735 bp, Mus musculus
cccgaggaggaggagaaggccaagaagtcgttcctgcagagcttggagtgcctgcgccgcagcacgcagagcctgtcgctgcagagggagccgctcggcagctgcaaactgaggaacagcctggactccagcgactccgactcggccctgtgaggcggtagcccgcttggggacttgctccaccgccaagcgccgggaaacagagggagcatccggaggggacccgctccccaggcggccccgaccacccggggtcagctcccctcactccttgggactgtagcccggctgcggacccaccggggtcccgaagagcgttcggggacgccagggaggggagtcgctttctttgcccttgtaaatgtttattttttaactctttcccagtccgaactctgctgtgagtgtgcgcgggaggcggctccgctgagtcggctcgtcgccgggggtcgccgatgcaattcggattctgcacaccgctccactgtgccccacctccagcgcacacccgttcacactcacgccgacactttcgctgaacactttttataattgttgggctaactgaggggacttggggcgcagcgcggctgctgctgcagccgaggattgatatttatttttgcattgcaatagctgaaggcgttttatttaacggtctttttacctggatgttgtcctgtgaggagtctaacatggacacaaataaagccaatatatttaccactaaaaaaa

SEQ ID NO: 2664 - DNA, 791 bp, Mus musculus
  misc_feature (569)..(570): n is a, c, g, or t
  misc_feature (591)..(591): n is a, c, g, or t
ggctcgagcttcaaaaaaaaaaaaaagtcaggtctcatggccatggtcacaatgtgtgggttttgatagaattctcctgctcaatgaggcaattttggctgaaatgggaaaaagaaaatagtactgtatgtgtggatacataggtaggtcttgggtgcacaggtaaagatactgatctatcattttctcttttagtaaagaaacactgtaaagctgaagagagccgtggctctaatcagtgtggttatagtgcatgagcacagtcacggagggtgtaaccatcatcttattgtgtatgcctatgggacatgcgattctccgccttagatgagtgtcacaggcagtttagcacaatggttgcaacctgaatcagacaggctgccttggtaagtacactgtagttgacaccatgctttggcttcctacaatgtgtacacggtgtagtggcatcgacctgtgtgattattggatgattaaggctggctgcttaattcttgggccaaggccggggcctcaaaaaacaacaaaaatttgggggtattagcaccttaaacccctggcacacacgnngagcacttaggaagtgcttgngctcacaattattgagagccgaattaagcacatgcaaggtttcacttggcaacacctggaagggcaaccaacccaagtgaacaggcacatctggtgagtgtcttgaaatcatttcctccacgtcctctttgttctctcctcaccctccccagcttgttaggatatagctgctgaaagacactaaacagatctaagtaaac

SEQ ID NO: 2665 - DNA, 736 bp, Mus musculus
ggctcggatctaagagatgaagctcggagaggttaaacgctgttttcttatttaatgtgatgaacacaatcattcattctacaagctaatgtttgtgaaatgcgtgatatagttgcacttcccagtttctcttttaaacgttaatactaagctttacttgtgttttgcacatttaattttatggcttcatttactcaagagtttgaattatttttcctgttcattttgtcagtagtactaagaaatgagactagtatttattaaacacatgtaatatgttcactagtatactaccttaagaatttgctgtttttaatcacaataccttgatttttttgtatgattttaatacatattttctattactcatttactatttttgtgtcattttattggtctctccacccctgtttctcttcatgttcgtaatatcttcaagtaataaattgtattctcttcagaagggagaagttcaaagtcatttattagtaactgatgaagctaggattgtatatctcagtgaaagtaacaacttaagtatattctttattaaattccattctgtaacttaacggtatttttgagctaatacgcttttcttggtataagaatactgcaggaaacaaattatattatgatccagggttctttattattggcacttacctgtgagtcagggcatttaactgaagttctggttctgcaggttgctatataattttcaaatggctaagga

SEQ ID NO: 2666 - DNA, 807 bp, Mus musculus
gcgtatcgactactatagggcgttagagctccccggggggcggccgtggctcgaggtctggtaccattccttctctgctcgggttgagagagaaaccgaggctggaacatgggctgggggtgatggagacagcaggccgcttactccccacggctcctccagccccacaacattgctgagaataagtgactgatcacctctgtagcaagtcttctcctgaaaggctcagggaacatcttggaacaggagggagaaagtccgtaggagccgaaggactggggagtgctgtgaaatgcggtctgctgtatctgacacggccattaccctcatgaactcacagcaactccggttgtctgctcaagacctacacaagatcaagccaatggaaattccatggatgggagagggacttgcaaggctctgctccttagatgagaggaagcctcccaaggagcctcctgagagcagatgtatgccacccgtgttggaggaaaacttacttcctttatggaaccagacttgtgttcctcatagtttggatgtgaagcctgccaccctcagcccatgcttgtatgcggatgccttggttccagccagtagtgcttttgagagatgcttttgagaggtgttaacctcaatggatcagttcattgggagaatttgaaatgctattgccatttgggggaaattctgacatgaacaagattgttcattcaggaagtggatcagaacaaaagaacgaagaaactctcatgagacattggtgtcttgcttggcttaaagaggaaacttttgtttacctagagt

SEQ ID NO: 2667 - DNA, 691 bp, Mus musculus
tggctcgagagaagagaagcagtgtttggaaagaactttatacctcctaagaagccaaaaacctttcttcagttagtctgggaagcattacaagatgtcactttaattatactagaaattgcagccatagtatcattgggcctttctttttatcaacctccggaaggggataatgcactttgtggagaagtttctgttggggaagaagaaggtgaaggagaaacggggtggattgaaggagctgcgatcctcttgtcggtggtgtgtgtggtgttggtgacggctttcaacgactggagcaaggagaagcagttccgaggcctgcagagtcgaattgagcaggaacagaagttcaccgtcatcaggggtgggcaggtcatccagatacctgtagctgacattactgttggagacattgcccaagtgaagtacggtgaccttcttccagctgatggcatactgattcaaggcaatgacctgaagattgatgagagctcattgactggtgaatctgatcatgttaagaagtctctagataaggatcccttacttctttcaggtactcatgtgatggaaggttctggaagaatggtggtcactgctgtaggtgtgaattctcaaacaggaatcatcttcaccttacttggagctgggggtgaagaagaggaaaagaaagatgagaagaaaaaaa

SEQ ID NO: 2668 - DNA, 740 bp, Mus musculus
cggtggcggccgttttttcgggcggctcgaggtcggctcgaggcctggatgacactcggcaagcagaagaatgacgtcagccgggagctcaaggagctcaaggagcagatggaatgtcagctggagaaggaggcccgattccggcagctgatggcccacagttcgcacgactcagccatcgacacggattccatggagtgggagacagaagttgtggaatttgagagagagacggaggatattgacttgaaagcacttgggtttgacatggcagaaggcgtgaatgagccttgtttcccaggggattgcggcatatttgttactaaagtggataaaggaagcattgctgatggtcgcttaagggtcaacgactggctgctgagaatcaacgatgtagacctcatcaacaaggacaagaaacaggccatcaaggcactcctcaacggagagggagccatcaacatggttgtgaggcggaggaagtccctgggtgggaaggtcgtcacacctctgcacatcaacctcagtggacagaaagacagtggcatcagtttggagaatggagtgtatgctgccgcagtggtgcctggaagcccggctgccaaagaggggtccctcgccgtgggagacaggattgttgcgatcaacggtatcgcactggacaataagtctctaattgaatgtgaatctctgctgcgcagctgtcaagactccttgaccctttcctttctgaaggtgtt

SEQ ID NO: 2669 - DNA, 583 bp, Mus musculus
ttgaagctccccgcggggcggccgtgtctcgagtgctgacaatcttgaaactgttatcattttgcattggacttgagctgaggtgcttttaaaatcctaacgactagcattggcagctgacccaggtctacacagaagtgcattcagtgaactaggaagacaggagcggcagacaggagtcccgaagccagtttggtgaagctaggaaggactgaggagccagcagcagcagtgcatggtgaagatagcccaggaaagagtgcggttcggtggaggaagctaggaagaaggagccatacggatgtggtggtgaagctgggaaagggttccaggatggtggagcgagagcgagttggtgatgaagctagctggcggcttggcttgtcaactgcgcggaggaggcgagcaggcattgtggagaggatagatagcggctcctagaccagcatgccagtgtgcaagaaaggctgcagggagagcatgcggtgcggtaacattccttgaggtcggcaacatggtggatggattctaattgatggttgactaattctggaattaaatcgggtatagcttcccaaaaaaa

SEQ ID NO: 2670 - DNA, 692 bp, Mus musculus
tccccgcggggcggccgtggttcgagcattgacctacctgccccatccaacatttcatcatgatgaaactttgggtcccttctaggagtctgcctaatagtccaaatcattacaggtcttttcttagccatacactacacatcagatacaataacagccttttcatcagtaacacacatttgtcgagacgtaaattacgggtgactaatccgatatatacacgcaaacggagcctcaatattttttatttgcttattccttcatgtcggacgaggcttatattatggatcatatacatttatagaaacctgaaacattggagtacttctactgttcgcagtcatagccacagcatttataggctacgtccttccatgaggacaaatatcattctgaggtgccacagttattacaaacctcctatcagccatcccatatattggaacaaccctagtcgaatgaatttgagggggcttctcagtagacaaagccaccttgacccgattcttcgctttccacttcatcttaccatttattatcgcggccctagcaatcgttcacctcctttcctccacgaaacaggatcaaacaacccaacaggattaaactcagatgcagataaaattccatttcacccctactatacaatcaaagatatcctaggatcctaatcatattcttaattctcataa

SEQ ID NO: 2671 - DNA, 852 bp, Mus musculus
gtctcgagccttgtacctttgcataatgaactaactagaaaacttctaactaaaagaattacagctagaaaccccgaaaccaaacgagctacctaaaaacaattttatgaatcaactcgtctatgtggcaaaatagtgagaagatttttaggtagaggtgaaaagcctaacgagcttggtgatagctggttacccaaaaaatgaatttaagttcaattttaaacttgctaaaaaaacaacaaaatcaaaaagtaagtttagattatagccaaaagagggacagctcttctggaacggaaaaaacctttaatagtgaataattaacaaaacagcttttaaccattgtaggcctaaaagcagccaccaataaagaaagcgttcaagctcaacataaaatttcaattaattccataatttacaccaacttcctaaacttaaaattgggttaatctataactttatagatgcaacactgttagtatgagtaacaagaattccaattctccaggcatacgcgtataacaactcggataaccattgttagttaatcagactataggcaataatcacactataaataatccacctataacttctctgttaacccaacaccggaatgcctaaaggaaagatccaaaaagataaaaggaactcggcaaacaagaaccccgcctgtttaccaaaaacatcacctctagcattacaagtattgaggcactgcctgcccaggactaaaagttaacgggccgcggtatcctgaccgtgcaaaggtagcataatcacttgtccctaataggggacatgcctgaacggctaaccgagggcccacggccctatccttaacagggaatg

SEQ ID NO: 2672 - DNA, 859 bp, Mus musculus
actccccgcggggcggccgtggttcggctcaggcaattttttagctcaggacgtgaccgacaaaactgaagaccttgggagaaattgagagacgtccgcacatttgagtcatactgatggacctgtaggtagcaacactatgcacatgatgcggacagtggtagcaccccttagttttgtatgccagagtcctccttagggttatcgttgctgtgatgaaacaccatgaccaaaaaccaagttgaagagggaagggtctcttcttcttacagttctatataaaagttcatcatcaaaagcagtaagggtagcaactcaaacagtccaggaacctagaggcaggagctgatgcacaggccacagaggggtgatgcttactggcttgctccccacggtttgcccagcctgcttgcttatggaacctaggaccaccagcccagggagtggccccgtccacaatggtctgaatcactaattgtgaaatgccctacaggcatgcctacagcccgatcttatggagacattttctcaattgaggcgccctaatctctgatgactgtagcttgtgtaaactgatataaaactagccaacatacccaggaaggcataaaaaaagaatatgtggaaagttagttcaagaacaccctgtagatgtcaaactctgcttatcggtagatgtcccttatagaaaatggcatattgatttgtatctagcctgcctgtatatctttctatattacaagtctcaagaatggaacttataacacataatacaatgtaattgctgatttgggggaaaggggggttgcttatggataacccaagaaaaatgggtggggggggggtagaaaccttaaaa

SEQ ID NO: 2673 - DNA, 679 bp, Mus musculus
  misc_feature (100)..(100): n is a, c, g, or t
tgagctcccgggggggccgtggctcggattagttttttcatttgttctactttattaaaaggtggggttctagttctggtttctcatagatttttaaacntatctaattagagaacacttttgatccatcacagcaggtcaccagccatgacaaggctcaatctaggactctcagcttcctgcgctgctggacacattgacctctgtgcaaacattgtagacttcttattgctactcaattcttgctactgctcatgattcaaatgtctaccacaatctgaattgggatgttgacattttgtggttattttcagattaatagtaattgttatgctcttaaaagcactcatagaaagtgtaagcatgtgtaagcatgtcctgaatagcttactattctgtcatggtaaaacacagcctttctgttcaaatattaggccaatctgtaggtggaaaaattaaccaataaaataaagacagctttggaaaggagaaggcactttaaagacatgaaacctcttattacatgctcttgtatgtttttaagcataataagctaactggatttgggtatatgccctttaagttaaaaataatatgtatttctaatttgcatatttaattttgcaacactaaggaaatgttcatgtgttgaatttgtaaatataattttgcaaccaaa

SEQ ID NO: 2674 - DNA, 785 bp, Mus musculus
gggccgtttttcgagcagaaacaccactcttaggacactcctttaaaaaaaagtttttctactttgtaaaccagctaactcccagactttcttgaggctttgtttttgtttggttggtttttagattttaaaacattctattcactttgaaatgtactatatgtgttatatgtatatataagttatagtgacttgaactctgtttggcataggctgagaactattgttggtagcatagagtgtacagagcagccgctgactgtcaccatctgagagcaggatacagaagggagtttggttcctcagcagtgaatgccctggtgctgatactccttagtcgtatagaccaactcaagcaacagcagcattatttactgggtcacacctgggaggaacttagcttccaaatttggtttttgcttttcatctccagggccttaataagagtgtgttaatacacatgactattttacagataattcaaaataatttattttttatttgaagaaagcgaaatccaccttaaaaaaaaacaaaacccaagattttattttatttttaaagccatatttttgtgctttgtagcacttagattgttccatatgtgatccatatctgcatttcattacctgggttctaaaaaagatttatttttgttctgtgaataatttttgatggttcttgtacatgtacagaatatagcatacgttttgagggtcttttcattgatattcctaccaaaaaaatacaaataaaactttaacttttaaacatttccaataaaa

SEQ ID NO: 2675 - DNA, 517 bp, Mus musculus
ggttcgaggagaaactctgtctcgaaaaaaacaaaaataaaataaagtattcaccataatatgttttatggcggccccctggatggaccctcctctgaggcactttgttaccccatttgttgaccttttgtcagcttgaaacagttaaacagagatggggtcagagaggggcaagcctctgggagcagtttggatgaaagggggactaatgggccctccccttcactcttctttttgcattgttttgagactcagaactaaagcagccaggttggagccttctgtgcatccgttaacctgtctcaccggaaatggaagctcagtttaacatccttcagagcagcttggtgctctggccgctgccacgtttcagagctagatgtgtctgctgctgagggtggaatctgtattctcctctaacagtgctgcttctgccgcaccaataaataaatcccaacaggtttgagataaggatccaaacacaggtgtgcagagccaggccaacccacaactttct

SEQ ID NO: 2676 - DNA, 709 bp, Mus musculus
tgtggcggccgtggttcgaggcggctcgaggaaatatgaaaggctcctctaagacatgggagccgggtgcttggagggacagcacgcctcggattggtgtctaaaacgccatcccggttggagtatagatgggaagattatctactgacttttttcctagccactgttccctaaacagtacatcaggcacctggcatttgttttggatttggtggatttttagagatggttcaaagtatgtagtgttcttgcaggttctgtgtacattgtccaccccttggcttaaaggatttgccatgcatctcaacattcagtggggccctggaaccaacccaacacaaagggacaactaattattactcttgttaatcacacaaaatgttttgtgcccatctccccctcccccgctcccaccccggtgttcatgggtctgagtggactctgtctgcatgaatttcatgggacagctgctggcgtatgggaccaagaggaagaggaataagaatgccctcccaccggtgcttgtgaaggggagaccggactccccacctctgtccatgctggctggaacagccgctgcactaggggatttttttttcttttggagcttcagttctatctacagcaagggctggggcagcctgaactactcaacacatttcatagtgcaaatatttcttcataataaaaaaacagacccgcaaaaaaa

SEQ ID NO: 2677 - DNA, 798 bp, Mus musculus
tggctcgagctttactgggaagggcagaggaggaaggagtggggctgtgacattgtccatgtattggcagacgagaacatggactgctgttgctttcagcactcttaaagtgatctctctttttctgaaggaaccccaatttatgtccacgttaattccttgctctctctctgagcacttcaagagagacaagtaggaattttttgttgatactaggttgaaagggagcactctttcgtttcctcttttgttagcaaaagttgcaaaaaagagttgtacattctttctgaggaaaaccaaaaacaagccaaaaacacaagggacctaacaaaacttgacagtgttactatatttaaaaatatttttatagatgcattgcaggttattaagtgtaaaaaacaaagatactcctttttttaaaaaaaaattagttaagtcatctatgatttatgttaccaagttttagaagcaattttctaataagcttgtggcattatgaaatactagaataattttcttagtaaattagtttaaaactttttaattaatatagtatttttctagagtgaaatatggcccttgactgtttactaatagataaagccagatattataattgtgtgttgttttaagaacataaaatatggtttgttacagaacactaaagctagaagccagacctttttccccctagttctgagtgaactcaagagttcatgtgtgcaagtggagcgccatctccagccctcagagcagtctctcaagggtcttgctgtataagcataatatttctagaaa

SEQ ID NO: 2678 - DNA, 756 bp, Mus musculus
aaaaaaaacccaaaaaccgaggttagctttgtgacagccgtggctggtggagtttggatgtttaccagcaagaataagacccagatttacaacgggcggaggcgaaatattgtaaaataacatcgattcgttcctaagaatagctggggagagatccattatggggctaagggctccttggaaggagtcaccttcaaccgggaggcgatgttgaaggaatagattccggatcgatggaacttattttgatcatgggttaggttttccttttttattcagcaaacctagtaaggtagtaggccagagaaaatgggtcgttgtggatcgtatttgagtggattttcttgattttgctgtctcccaagtccaacagcgttgttaggaagtgtcttgcgctctggctgtttcttgctagtaggctgagcctaaagactgacttgatctctcctttgcaaggtttggaatttgaattgtggaggtaaactggctgtaatagtctccagacagctgcctctgagttgacatctaatctgccatctgattggctcccctctcaccattgggcatttagcactgctgatgtaaatagaagtgcggagcagtacagtcacaaaaattcctgacacaaataataactgaactctattccaagcacatggaagattgaatactatttagagcttaaatgttatgaatcatagttagtaataaaggattgaatacagagaaacatgctggtgtccagtatcagggcac

SEQ ID NO: 2679 - DNA, 835 bp, Mus musculus
tggcttcgagtcctcccgcatcatcatctttattctcaagaattctggacctgactcgccgttcagaaagggattcctgcggaagcctggtttattcggtgccccgtgtgataagtttcagccagacacgaaaggaatgcagcggttaaagcatagcgacttagcttccaggccgatttccttaagactggggaacgaagaactatttattctgccttaaagggatggcaactgggtggagatgacgtcaggcgaatgtagactatgggtacactcctagtgggctaatgtagcatagagagaaagcaggtaggtgtttctctgttatgtaagcaataactttttctgtgtcttatggagtatgactagcaattatttatttccatgctagacggttctttgcatgtgggttccttataggtgcagacatctcggccaatggaggtccactggccactttgtcatttggacgagctgttactggattgaaattcacataccatttcactaaaaattgtgccttagaaaacgcaaagctgttgcacacagtgacgaacggcagattcggaacaccaaagggagacgaagtcactccctagttcccacggcttctctcggaggtgtttgctgctttacaaggggggaaaaaaatgaataaaagattttaaaagacaaataaaaaaaaggaaaaatttaaaaagaaaaagaaaagttttgaaaatgtacagatcaagtccaatatttttttttgatgaagcacctgcatgttttagtaactattctaataaaatgtgatgttttacactccgcaaaaaaagaatcgatatcaagctat

SEQ ID NO: 2680 - DNA, 826 bp, Mus musculus
gggtggcggcgcgtttttcgaggaaaaacacacccattatttaaaattattaaccactcattcattgacctacctgccccatccaacatttcatcatgatgaaactttgggtcccttctaggagtctgcctaatagtccaaatcattacaggtcttttcttagccatacactacacatcagatacaataacagccttttcatcagtaacacacatttgtcgagacgtaaattacgggtgactaatccgatatatacacgcaaacggagcctcaatattttttatttgcttattccttcatgtcggacgaggcttatattatggatcatatacatttatagaaacctgaaacattggagtacttctactgttcgcagtcatagccacagcatttataggctacgtccttccatgaggacaaatatcattctgaggtgccacagttattacaaacctcctatcagccatcccatatattggaacaaccctagtcgaatgaatttgagggggcttctcagtagacaaagccaccttgacccgattcttcgctttccacttcatcttaccatttattatcgcggccctagcaatcgttcacctcctcttcctccacgaaacaggatcaaacaacccaacaggattaaactcagatgcagataaaattccatttcacccctactatacaatcaaagatatcctaggtatcctaatcatattcttaattctcataaccctagtattattttatccagacatactaggagacccagacaactacataccagctaatccaccaaacacccacccccaaaaaagaattcgatatc

SEQ ID NO: 2681 - DNA, 785 bp, Mus musculus
ttcgggcggctcgggcggctcgagctggagccatcctcctgcctttctttctcctgccaagggatcatgctctcacctccatttccttccatattagccactgtaacaataacaaagttccattctcaaatgatttctgggtggagatcaggtgaggtcttgctataatttaaaaggttcttaataaagtaagactgtgtaattctgctactatcttaaaagatgtttttgcttcttcctagaaaacccttccttttatgattatattggtaacttgtaaaagaattttgttgtgtttgatgcaaaagaatattgggagtggctgactgtggcagacatgtaaggcaaatccacagcctattaaagtgcacagcatttgcatttggtattatggcataaatctctatctttattgaaagaatactggctaatatcttccctgttaggcatgccaagttgtaggggagagattgtgttatttatttatttttttttaaacaatccaatggatttgtttttgtctgtattttgagaacaacttgaaggatttttttttcattttagaagatagagtatgtatacctgccttttaagttactataacctaatatatataaattataacattgaaaaggcaaaaagctctaatttatgatgttatttccctggtatttaatttttataaatggttttgaagtaaataatgtagtattgctttgagtagtttaaagtcatccttaaataagttctgactcaacatactgcgcttagtacatattctaagt

SEQ ID NO: 2682 - DNA, 720 bp, Mus musculus
  misc_feature (616)..(616): n is a, c, g, or t
  misc_feature (640)..(640): n is a, c, g, or t
tcaccgcggggcggccgtggctcgagaagacttctgtaaaactgtgacctcagctactgccaataaaactgcggagccctcagaggctcatagccaccacaaacaccacaacaaacatgggcaggagcatcttggcagcagtaagccttcagagaatcagcaaccagggccatcagagacgactctgcctccttcaggcttgcaccaccaccacaggcataggggccagcacaggcagggtcacttagagagctgagacaccacagcaagtgaaggcttgcacctttcacttgcccagaggaagctctgacgaagggggtgcatcaaccagctcctgtgtaagttgtctaaggagtccgaggcagcccccagcagctgctgctgtcactgccgccacctcacatttgagaagtcagggtctgcaattgcttgacagtgtgcggaaaacctcccatccttatgtagctgacaggggcttttcgcggaggagaaagtcactgaatcctgtcagtgtaggtcacctccagctgcctgacaaaatcagcccatgaaccccatggaagccaaccccaactgaagctgagataatcagaccaggaagtgaaaatgacattcnaaactaaaattatttaaaaacaanggcatacctctccccaactcagtctaaagacacaatttcatttttgagaatgtttacagcccatttaaatttaatcaggg

SEQ ID NO: 2683 - DNA, 736 bp, Mus musculus
gtctcgagggatgctttgttaatgtgaccttgactggctttacaggcgtgtagaacagtctacacgggcgactatttgcatccatcttgttgttgaggtggatgaaaataaggaaagactggagtgtgtaagtcatgcacataagtattcactgtaaattttattttcatttttaacccaattatggtactttgtccaatgcacaactgatctctcagtagatattcatttgaaaatagtgtggccttgctcagtgagaaggggaagaagtgacttagacttgtgttaagatgacctgttggctgagagtggtcgttctgcagcactcttaatggcaagttttgattagggagagttaatgtttttgaccctgaattgagttttcttctatttttaggaagtatcagaattgctctgatgagtaacgaagttgactgctttgatgtccaatctcaggttttaaaagatagtggtataaaagcccactgttactaattcttaagacagttttgatttagtatcccctaaaagtcacatgcataataaggcctgttcaaagagcagagcctccatctttttgctccttttccatgttgtacttcacttgaagaggtgtcaagtgactttgcattgtatatttccattttaaccctgacatagttctcaaagataaagcactttttgaacatgaaatacatggaataatggtgtgatgtggatcatggttttctcagag

SEQ ID NO: 2684 - DNA, 666 bp, Mus musculus
ccgcggggcggccgtggctcggtccatccatcgcagatcatgtaaaaatggggaccatctcaggctagccatagaatcatcatccactagccataggatctcctagatggcttctgacacaccatagatgaggtgatcattccccatcctccttttagtgtctttcttccttttgcttctgctttcttcatagcttcttccatgtagagtatttacattactatgaaaagaaggcaggaagcatagcattatagaagaaaagggatacattgttaggcttagttttaagtgatttaatgtagacattgaagtcaaagtcaatgaagaattggttaatatcttattggcagtgaatgccgtggtgtgatcaatgttttagaaagagctgtaaaggagatttgaatcccttgatgacattcaatgaaaaagacttatcttctatggagaagccgaagatctcggataaaaaaaaacaatgaggggataaagattatggggtgtgtgtaaaatgatggcaactggctctctttttaaacaacatacttagctgtgcccaagttgaaatctgtcagaaaacaaagaggttagctgtttgttctcagtgtctcccctctaatttgaatcaatggagattcagcagcttttctttctcagcccgcaaaaaaa

SEQ ID NO: 2685 - DNA, 805 bp, Mus musculus
ggctcgagtgagaaacttgacaagtacctatccactttaccattatgaaatctataattaaaaaaaaaaagttgagatgccttctccttttgagggaaaaagggtgcttttattgtataaagcagtgtctctgtgttttgatagcccactgtttgaactctcgtctttagctggtagagtctcagatatccctgacgtgtggggcattccgagtgtggtgagaggtcccaagaggctcctttgccctgcgtgaagagcatgctatcagtgtacgggtgattgtgcaaagctcagcgcgggggagcatcttctgctctaggttttatttctgctctttattgaagacaaacattcgccaataaagaaaagggaaaaaaatgcgtttgagagaaactaattttctttggcaaaagtattacttaaatttttggcctattaaggttcccctagttagtactcggattccccatgctaattgttcagcttgtatgttgttaagacactgttgattctgtaccagactggtttcaaaacaaaaaaagtaccacgttgaaaataaactggtgactgtttttcttcatatggctctagtttggcaccttcactctttccaaaacgtgtctgtgcgccagagatgtcacagttcaagtgtctttctagtgtggctttgtatggcttcctttgaacattgtacatacattgtatctttgctttatggtaataagtaataaaaaatgtagacttcgattttgtacaaaatgtcctatgtaccagaataaaaaaaaggtcatagaacaaggcacaa

SEQ ID NO: 2686 - DNA, 842 bp, Mus musculus
  misc_feature (695)..(695): n is a, c, g, or t
ggctcgaggatcagagaagatctgcgagtagaatgttccaagtttgggcagattcggaagctccttctgtttgatagacacccagatggtgtggcctctgtgtccttcagagagccagaggaggctgaccattgtattcagactctggatggaaggtggtttggtggccgacagatcactgctcaagcctgggatgggactacagattatcaggtagaggagacctcaagagaaagagaggagcggctgagaggctgggaggcattcctcaatgctcctgaggccagcagaggcctccggcggatggattccatcgctggttcagaaaggccagggccttccagaatgaggcatttttcagagcacccaagtatgtctaatatgaaggctcaggaagctacaactggaatggcatttgaagaaactatcgatgaaaataagtttgaaaaggcagaagaagggggagaatccgaaggagatgcttctgaaaaagatgccaaagaaggtgggtctgatggggaccaccctgagagagagggtggagaaggctgctccaagaaagagtctgaagacaatgaccttggcaaggagtctgaaggggaagacagcctcaagaaagagtcggaagatgatgattcagaggaggaatctgaggaagacagctcagaaaagcaatctcaagatggctctgacanagaaatagaagaaaatggtgttaaaaaagatgttcgccccggatgcctctgcaaggagctcccaaagatgttgagaagagtcagaagaaatgagacctgccatcagaattggaggagggtctgaagagggtagatgaggaaggtccg

SEQ ID NO: 2687 - DNA, 766 bp, Mus musculus
gctccccgcggtggcggccgtggctcgggccgcctgagcgccgcgcttttcagcctggacagcccggtgcgcggcacaccctggcccacagaacccgcggccttctacgagccaggcagggtggacaagcccggccgagggcccgagccaggggatctgggggagctgggctccacgactcctgccatgtacgacgacgagagcgccatcgacttcagcgcctacattgactccatggccgccgtgcccaccctagagctgtgccacgacgaactcttcgccgacctcttcaacagcaaccacaaagcggccggcgcgggcggcctggagctgctgcagggcggccctacgcgacccccgggtgtggggtctgtcgctagggggccgctcaagcgcgaacccgactggggcgacggcgacgcgccgggctccctgctgccggcgcaagtggcgggtgcgcgcagacagtggtgagcttggcggccgcggctcagcccactccacccacttcgccggagcctcctcgaggcagcccggggccgagcctcgcgcccggcacagtccgagaaaagggcgcgggcaagaggggtccggaccgcggcagcccggagtaccggcagcggcgcgagcgcaacaacatcgctgtgcgcaagagccgcgacaaggccaagcgccgcaaccaggagatgcagcagaagctggtggagttgcggccgaggaacgagaagctgcatcagcgcgtggagcagctaaaccggggacctgg

SEQ ID NO: 2688 - DNA, 798 bp, Mus musculus
cccccgcggtggcggccgtggctcgagacatgatgaaactttgggtcccttctaggagtctgcctaatagtccaaatcattacaggtcttttcttagccatacactacacatcagatacaataacagccttttcatcagtaacacacatttgtcgagacgtaaattacgggtgactaatccgatatatacacgcaaacggagcctcaatattttttatttgcttattccttcatgtcggacgaggcttatattatggatcatatacatttatagaaacctgaaacattggagtacttctactgttcgcagtcatagccacagcatttataggctacgtccttccatgaggacaaatatcattctgaggtgccacagttattacaaacctcctatcagccatcccatatattggaacaaccctagtcgaatgaatttgagggggcttctcagtagacaaagccaccttgacccgattcttcgctttccacttcatcttaccatttattatcgcggccctagcaatcgttcacctcctcttcctccacgaaacaggatcaaacaacccaacaggattaaactcagatgcagataaaattccatttcacccctactatacaatcaaagatatcctaggtatcctaatcatattcttaattctcataaccctagtattatttttcccagacatactaggagacccagacaactacataccagctaatccactaaacacccccaccccatattaaaacccgaaatgatatttcctatttgcatacgccattctacgctcaatc

SEQ ID NO: 2689 - DNA, 848 bp, Mus musculus
ggctcgaggaaaaagtggatgaaattttttgtgtatgtatatttgtgtgtatagtatgtgtatgtatgtgtgtatatatatattatatatagataatatataaatatttttttaagaagaaactagaatgtttagctagaaaattctacagcctgtgaagaagtatttcaaaatggccataaaggaggttaaaagaaattgaaaactataacctaacttttatagaggctttatctttaatttaatagtttgctggagacattgttggcgttgagtcttttccaggctgctgattctgctagtcacgattggcaagcctggaataggggaccttcggccatttagaaggggcatgaacaaaatactggccaaccagctggactcagacacacaaaggttttaattttcctttcagccttactagaagatctaacctaagagtaagctgaccacagggattgttttttagaatactttttatgcagatgaaactattttttccagcatgtagattcttccagctttttcaaggagtactttcccggaatttggcataccacagcgtagacagctgatatttctgatatttcatccagctgcttggctttttgggtgtggatctttacatatatgagaatgagtctggctgggctggtatttcgtttgatcttcctggaaacgagcaatgattaaagctcccttaactgcttttgttttgttttgtttattgatctggcctgatgaatacatttctctacagaactgatttcattttgctcaagggggaaaagcactttgttggcaattaaaatcctagcactgattgctggatgtggaaactacctaat

SEQ ID NO: 2690 - DNA, 336 bp, Mus musculus
gatagcaacttttttaattcattatttttaatcacgaagtattcagtttctataaaatcaactttagtttaagaagatcccatgtgttcccacaagggcagagttttcccctcatctacatcagggtggatttctgcagcataattatactgaaattttattttaaccttctgtgtgttagcatatttctgttaataataaacaggttgaatcagggtacgtgaaattgtgggttctcaggataatggcaagctctaatttgtgtgctgcagtgtgctaaagctggtttatgcacatgacattattctttgttgtatgaaatggttctgcttcgtg

SEQ ID NO: 2691 - DNA, 627 bp, Mus musculus
actccccgcggggcggccgttctcggcattgcctacctgccccatccaacatttcatcagtgattgtttttttgggtcccttctcggagtctgcctaatagtccaaatcattacaggtcttttcttagccatacactacacatcagatacaataacagccttttcatcagtaacacacatttgtcgagacgtaaattacgggtgactaatccgatatatacacgcaaacggagcctcaatattttttatttgcttattccttcatgtcggacgaggcttatattatggatcatatacatttatagaaacctgaaacattggagtacttctactgttcgcagtcatagccacagcatttataggctacgtccttccatgaggacaaatatcattctgaggtgccacagttattacaaacctcctatcagccatcccatatattggaacaaccctagtcgaatgaatttgagggggcttctcagtagacaaagccaccttgacccgattcttcgctttccacttcatcttaccatttattatcgcggccctagcaatcgttcacctactctttctccacgaaacaggatcaaacaacccaacaggattaaactcagatgcagataaaat

SEQ ID NO: 2692 - DNA, 687 bp, Mus musculus
ggagctccccgcggggcggtcttttcttcgagtgcaagagacagtgtgcagggttcagcctgcagctgttgtttggttacttagagcaaaagtatacatatatgaagccaaaaatcaaccagcaaggaaggtcaagtgctccctacacaacaaacaaatgttagcaccaaaacatgtattggcctcctctttgacatgtaaattatgtgagccctcaaaatctaagtgttgtggtattgagttgagtggtgagtttggattctgtcacctaaacgcttaacaaagaaagcccaagttctgtggaaattttaatcatagcagatgtctctgtgtcaaaggatatgaagtttcctgcccagagactgctttagttttaggatataattgtggaagtcctatcattgttccccaaatacatttctgttcatctctacagacgatcagctgttagatgccagcctattgtaaagttatgactttcatttgacaagttccacattgctatatggtggtaatgggtagatgacacataaggagttcatcagacaatctctgggtgtccaggctacaccccctagatgaatctaagccacataagaattatctatttcggagtcaatggctgtgagactaggacaaaaaggttcaatctacacaagaagataacctaaagaccattcactttcc

SEQ ID NO: 2693 - DNA, 718 bp, Mus musculus
  misc_feature (14)..(14): n is a, c, g, or t
cttcgtggccttancgtttgcatcaaaatttcatgcatcaggaaatccaagatttcagcccaaacccttctatgctcaagcagacagatgtgccacgcgtcgctgtagagagcgctgtccccacccaccacgaggaaacgtgtccgagtaatgccagcccacagcaaccagccaatcctgctgtctcaagggtatccgtacctcatgtcagttacactcagcagaaaaagtgacattaaggaaaacaaaacaaatcaggttctgatttaaaattttaacacacgtttagatagcttatttaaattctaagactgttttctaaacactgtattatttgtatataaatatgaactatagtttttactggtatccactaaattgagtgatacaaatttcatctattttattaccctatttttaagggaattttatgttttgtttaaccttgatgaattgtataaagagagaatttaaaaaattacattctttattttctattagctgtattcatactttggttgcttcagactttatatatattgttcttaaggattaggaaaggatttcatgtgttttaaatttgtcacttctattctttacagaaccttgtagtgccaaaaactttttaaaaggtcaaaaaaaaaaataaaattacaacataaagatctgaaatgtttttcctttacatacttgtatatcgaatatatttcaaatccga

SEQ ID NO: 2694 - DNA, 745 bp, Mus musculus
cggcggccgttggtctcgagcaagaaacggcccggcattctggctttctcagcgactgatacatactttaaacctttcacgttccttcttcacccctccaaaaaagtctttagttcaatatagacatattttggctgagagtagaataccattgaccaataggttttactgaattgtagtgttctagaagccatagagtagccatttggcccaattcttttttccttttttaatttgaaatacttttgtggccagcaatgatgcaattgctggttttcgacgtaaatagcgtcatttgctggacttaggagagatcattatctaaaccacaattactgtggccctctgaattatagactgtcaagttgctttctgtcctcttccatctctcttcagccagcaaccttacatcatacgtaatttgttccatggagtggagggtcccaggctctgatcaacaaggtcttgtggctgccctgaaggttccctggccaccatgctggaaatggcctttcctttgagacaaatgttacaatgagggaaaaatgcagtgcaggaggccagagcattaaatcaactcataaaccagtaaggtactatgagcctagaagccacatagtaccacatagtatcaggaagccaaagcaggaagggcttcaaggtgcgggctagcctggactatccgggtgagtttgagatcatataatgagaccctgcatttaacaaagaaaattactcttcaggc

SEQ ID NO: 2695 - DNA, 816 bp, Mus musculus
  misc_feature (45)..(45): n is a, c, g, or t
tcggctcgagcattcccggggcctttgttgtataattcatacctntgtggtgccagttcctcgggggtaaagatttccttattttcctaagacatttttagtttattgtgcaatcccatcttccctttgggtgttgcataaatattaactaaaagtctacatctggtgttcgtcgtcatttctatttgtcctaatataacttcgctttgaacaattcattcggaaagtgtgccaagggtgaaatgtggcacattaattccctttgcactacacagagtgctttgtaaaatgcccacggatttggttatttatgaacagaagatttgcacctcttccttacagtctcaattctaaagttgcagcaggctaaagtaatcaccaacccccatctgttttctgcaagggtatccaggaatctcctgctcaaagcttaacagattgaccaggtagcagaaaaaaaaaaaaaactagcccagcaggtgaaactgcctgttcagggaggtcagaacagagagctctctgctgtggggacttgtaagctctgggttgtgctcaggaaataacactgtgggagaaaaacagcagaccgtggatgaaatgtgggtcatggaatagtgggaggctcggggctgagctgttaactaatgacagtaaaagcattggctgcacatggctactgtgagatgtttcccagcgtattctaaagcatcgtcccacagacgtgacagcatgtcacccttgctttatccccacactccggatctattaggaataaaaataggggattgcaaccacagaaacagatcctggttccct

SEQ ID NO: 2696 - DNA, 757 bp, Mus musculus
gtttggctgacaccaccctgtgccccttttctctccaaatgccctttactcttcttcagttctccttccctctctgcacagataactggtcaatgtggtccaattggtggtgttaccttcacgtcatcttttactgtctgagatggctttatcctcagggcagaacacccaggctcagagcaggtcaggcagctggcccaagcatcacacagcaagggcaagttgtttccagtggtggcagtagggaggaagcacctcctagtgtgaaggttcctggagagaaagacctcacaggatgcgattttttttttattttaaaggttaccaagccaataaaacagtaagtaaccctatgggtgaacagaggagtgtgtcatcagagctgccgacctgaaagagcccaagtagactcttggggcttcatggccgatggggaggcagagatctcagcactgggctgagccaatggctgaaatgaccacaccaacctctaattcctcactcacacaagtgcttcacaccgtgtgccaggtactgtgctgggctctggggctaccacagtgagcaaagctctgcctgtgcgatgctgacattctagctggaaggcactagcataacaagaaggcttacagagagctgggaccatcttgccatctggctgggagggactcccactgcagggcaggaagtccccctgcaattctcctgactggctggttttctagccctgcggtgaggaaacccttgcgttcagatc

SEQ ID NO: 2697 - DNA, 758 bp, Mus musculus
ttggctgactccctcttctgggtgtctgaagacagctacagtgtacttacatataataataaataagtctttaaaaaaaaaaagatatttctccttactttcatagtaggatctttggttacttctttgttccttttgtagacagaattgagatttttgtttttcaccgactttggggttttttctgaaatattttagacatattaaaagataattatgtatggaagacaatgaatacctgttttaaataaaatgttctaaacttgtatgtgaatactcataatatagttctttaaggcactgatctttaagtgatatataccctaaaatatttcaaactaatagttagccaagcatatggttaagtttatagttatgatgggctaccaagagattctgtcactattaacattttatgtataaataagaacatatattaattaacaggcatttaaacacttggtctccaggtgtgctgtttgaaaggtgtggcctcgctagaggaactgttactgggggacagggacaggctttgaggtttcaaaggcttataccatttccagttcgctctgtatttatcgaatatactattgtataatgtatatcatattgtatatattgcaatatatactaaaaatatttattgggaggtaaaattgagaaaactgagaagcatggtattccacatgttgtgctctgtgggaggacatttcatattcagattgtaaccgtgatgttatggctggagttctaacctc

SEQ ID NO: 2698 - DNA, 777 bp, Mus musculus
tggtctcgagcaagttgtgaggtgcgtgtaatggctcaggacagaaggacaggctttttccttgggtaaggaaaaaggacaggttgaaaccttgagtaagcaccacctgtttaccgcccttgacaagatgtcttcagggaaatgcaggtggcctctgagagcaactttgcctttactctgctttactttgctgaaaaattttaatcctatgagcaggaagggcaaaccaggttctggtctcatgctttccctcccagtcttccccgaagctttccctgtcttcccgtcctgcctcacaatgacctcaagttcatcttcaggatgctgatatgagggctaccttccaatgaccagaggcgtacatgactgagtagtcccacccctactgagtagtgggtggtccagcccatcactgactttgctccgttctgcaagatgatccaataggctattgttaatctgtcaatcatctgttcattggtgagagtgcagacactttggcggtggaggggtggagggtggagtctgtcttttaaaaaaaattgttcttcctggaattcaagatgattcaagaggaaaagttaaggacattgatttatctctctgcctcaaaatccagacaccaaatgaaacagagatgccaggctcttattagtaaatgaacctagcctggggtcataggctctttcccgagaagctgggtttgaccatctgtcttccagaagcaaacagcccaattcatagcaacaattcagaaaagatgggaactgagagagt

SEQ ID NO: 2699 - DNA, 845 bp, Mus musculus
ggggcggccgtggctcggtcttccctcagagaagtggtcccagctgctcaggaactgtgtagcacacgcattcctacactgttctgccccagaatcgttctagaagttctagttgtgctccgaggcatcaactcccagtgccaacgcgtatctgaccaggtcaccgcctctttgcagctaagacacaggcaatgggtggagcgtaggttacgttcaaggcagcgtcagaactatgtgcgcatgctcagcagtgttagacttttatgtcccatgctttccctgattttgttgctccttgcactggagttggccagtgtccatgctgttcgtgataagggcgctgaggaacaacagcagtatctgagtacactgagaacctagtggcctacaccagccgagagaagaacaagtggagtgaagccaccactcttacacacgcagttttgttgaggatttggactttcagtgagaagaaacaaatgttaatacatttagccaaaaaaaccacaaataaagttgacataagctgacaaagaaatcacgaatcaaggtatttttggtcgtgacactgagctatagaggagaccttggtggtacttggtggcagctgcacatcctgtctgtcccattgcattttaccgtcaccccagcacacagccaacctctggaagaacgtaaaaatacaaagttgcggttcatcacttgggatttaattgttccctcagatttaacaccttatcttttaagggaacaatatctacatggtgccatgtctcaatgagtcacataaagatacatggtccacagacatgctctgcatcacttctaggcacttggctctatgc

SEQ ID NO: 2700 - DNA, 837 bp, Mus musculus
  misc_feature (121)..(121): n is a, c, g, or t
ttcggagccctagccctacacaaatataattatactattatataaatcaaaacatttatcctactaaaagtattggagaaagaaattcgtacatctaggagctatagaactagtaccgcangggaaagatgaaagactaattaaaagtaagaacaagcaaagattaaaccttgtaccttttgcataatgaactaactagaaaacttctaactaaaagaattacagctagaaaccccgaaaccaaacgagctacctaaaaacaattttatgaatcaactcgtctatgtggcaaaatagtgagaagatttttaggtagaggtgaaaagcctaacgagcttggtgatagctggttacccaaaaaatgaatttaagttcaattttaaacttgctaaaaaaacaacaaaatcaaaaagtaagtttagattatagccaaaagagggacagctcttctggaacggaaaaaacctttaatagtgaataattaacaaaacagcttttaaccattgtaggcctaaaagcagccaccaataaagaaagcgttcaagctcaacataaaatttcaattaattccataatttacaccaacttcctaaacttaaaattgggttaatctataactttatagatgcaacactgttagtatgagtaacaagaattccaattctccaggcatacgcgtataacaactcggataaccattgtagttaatcagactataggcaataatcacactataaataatccacctataacttctctgttaacccaacaccgggaatgcctaaaggaaagatccaaaaagataaaggaacttggcaacaagaaccccgctggtta

SEQ ID NO: 2701 - DNA, 662 bp, Mus musculus
ggtggcggccgtggctcgaggcggctcgagctccggtgaccgggagcgcctcaactggcagctgcggcgactccccccccccccccccccccggcactctggatatgttttctcccagatctgggtatttttttgatatcgtgaaactacgagggaaataattgcaggggtttcttctgggctccctgcgtcttccccatggacatgtccttcaatttggggagccgagacaccccgtcctaggcgaatgaagccccccagccacgagggagcgaaatgaagggaaattctgcagtggaatgagagctctactagctaggtcctcgcatctgccattctgtcctttcaaactgcattgtaatccgggcaggataaatcagacgaagagcagcctcctagccggatttctccgcccgaatttactttccagatttcttttctttgccctcctgcttctttgctggcccagggatgacttcctcgctgcatcggccctttcgggtgccctggctgctatgggccgtcctgctggtcagcactacggtctgcttctcagcaatcaagaacggctgtgtgcattcaaagatccatatcaacaagatcttgggatagtgtgagagtcgaatctctcatgaaaatgggacactactctgttccaaagg

SEQ ID NO: 2702 - DNA, 933 bp, Mus musculus
gggcggccgttggttcgagaggaagggtgagagctgtgagagggtttcctgtcaggggcagggagggcactgccaactgtgcttcctgctgaggactgaggtggggcagtgaggctgatagagatggaggatgcatagaggtgaaaggtgtttatagctagttgtatgtaggaatcaaaggcaggtaaaaatggagccagtgatgtagggaagctcatggaaggagatgagtgctgaggagtagaaagaaaattcagggactagagtccccagggagagagcttcagttcagcagcattaagacagtgtggaagttagaacttctggagacagggtaggctatgcaggcagaatgccaaaacacaggacaggtggaagatcacggtcagagtcagaggttccctgagagcttcatcagatgtgaatggaaggatgtgaaaagaagcagcacaggtcactgggagccatggacacagttagttctagaaggaccatgaagtctgggccagagagactgctgggtagagggtgcagacttggtacaatcagtcggatgcagagagacccaagtcaggtgaagcagtgggtgtggaggacaggtcaagctggggtgctgacgcacaggtctgtagaatacaccggagcaccccagagggcatcggaagaagcttcaggtgttgagagggtgactctgcttctctgagcagtggaaggtagagcaggagaaagggttaactgggacccaggagaaagtgtgaggaaggttgtaaatacgggggagggaagaagcatgagaggagctggggagagagaagggcagaggggctcagaggaatgaaccacaccagggatggtggcaggcgcgaaaaaagaatccgcattcaactaaggacccgcgaaccgagggggggcccggccccagcttggtgcctt

SEQ ID NO: 2703 - DNA, 798 bp, Mus musculus
  misc_feature (25)..(25): n is a, c, g, or t
ggttcgaggcagactgctggtttcntggatgtgacagaacaacagaacaacaggactgaataagattggagctttaaactgcactaagaagtaaatgtaaaggcagtgactaaaaccagtcaatctacacaggggcagttgcaaggtagactgaatggaagaaaagttattagggaatattttatatatatatatagaagaaacaaactgctgcaataaattatgcatgaggcgaggagaaagtggtatgagcactgagtgtggtgcggaggaatcactgacagtagcttctcttgaatgtgaacagtagtttggacaggcctaccaggcatgggatggtgcagagacgaggaattgtttgcatacctaacctttgtgctttctccaaggatgatgtttagcagttcagaagtgagcagaggtgtgtttaaaatggcgctccagtgacacagcagtggccacatgtgctaaggccagtgcttccttcagggtgccagtagacacaagaggaaggtgatctgacatcctgctgagaggatggctaagtgccccgcccacccacaagtacaatgtggatcttttaataaaacagggctgtattatcttgaatatatgtttgcttgttagaacatattaagatgtatttatttgccactagtatttaacattttggcacattttcataactacattcgtacctttcatatttgactcccaagtggataggctaggttgaacttggaatgaaatcatatactcccaagaactagcttatgatcctgagctggacaggctttt

SEQ ID NO: 2704 - DNA, 863 bp, Mus musculus
ttggctcgagcaggtgccaagtacacttttgaataactgttgagaataggtttcctgattagtgatcatgaagaaaacatgcatttttaacctggaaagagcttggcagttaacatggttctggttaccttgattagtgggataatttgttgcagtgtttcagaggtatagaatcatttttggctcaaaatagactgaaaacataattctccaaatcacatttaacaaaattgaatattagaggtttataggcaaaaataaccattttgaagttaaccttgactgctagcactgtctgctccagggatctgagcatcagggatgatctagtgtgtagagagtgttgtgggagcacagggaggaggcgtgtgaggttgaggatccgtctgctgtggattcttctgtttgcagcgctcttctgagacacccaggaaatggggtgctagcagtaagctattgtgagtggcatttcagagccttggtaactagagggagcaggtttctttgtaggtggcttttgtttacatccttagagcacatgttgagtttaatttccttccttcttttaaaggaatagatgctaactgcagaggataactgtacctaaccacctcgttatctcaagtagtatctgtggggatgggatctgtccatctagtcctcccttctgagcagggcttctttccacctttaaggaggaccaagtttcattgtcccaagtcacttttgagcatgaggtctctgagcttagaaaagggagagacagacaggtctgacagggaaaagaggctctccttattactttaataagagccatccatccaaaaaggagaaggcttccttcgatagactgcaggagggaa

SEQ ID NO: 2705 - DNA, 707 bp, Mus musculus
ggctcacccattgacctacctgttccatccaacatgttcatcatgtatgaaactttgggtcccttctaggagtctgcctaatagtccaaatcattacaggtcttttcttagccatacactacacatcagatacaataacagccttttcatcagtaacacacatttgtcgagacgtaaattacgggtgactaatccgatatatacacgcaaacggagcctcaatattttttatttgcttattccttcatgtcggacgaggcttatattatggatcatatacatttatagaaacctgaaacattggagtacttctactgttcgcagtcatagccacagcatttataggctacgtgccttccatgaggacaaatatcattctgaggtgccacagttattacaaacctcctatcagccatcccatatattggaacaaccctagtcgaatgaatttgagggggcttctcagtagacaaagccaccttgacccgattcttcgctttccacttcatcttaccattgattatcgcggccctagcaatcgttcaccttctcttcctccacgaaacaggatcaaacaacccaacaggattaaactcagatgcagataaaattccattgacccccttactattacaatcaaaagatgtcctaaggtattctaatcatattccttaactctcataaccctagtattatttttcccagac

SEQ ID NO: 2706 - DNA, 907 bp, Mus musculus
  misc_feature (13)..(13): n is a, c, g, or t
  misc_feature (766)..(766): n is a, c, g, or t
gactactataggngtgttttgaagctccccgcggggcggccgctgttcgagcaatctccacatggtactcctgatagtgagagctctcaagggagcttagaacttttgacctgtgatgagaaccaaaagagcaaaccagagtctctcattttagatgagggagaattgaaaatttcatcacccaatacatttaccaatccaaaatcacaagataatgccctcagtgcctcaagtgagacaagctctacattagctggaaaaggagcatcctctgactcagagcatttgaagaatgggactgcaaaggaaaagcttgtctgtagttctgaacctatcacctgtaaaccccagctgagagactcttttgtttcaagcagtctgcctacatttttttatattcctcatcaagaagctctgaaaacaagttcccatcttgacacaagtatccaaagaaacaaactaccagaaagagaagccattttgaagacgactcttactcaggatattaacagagaagccaggaagtgtcagttttcaggagatcagatgactcctttgaatacggattcttcatgcactgtgcttaagaagttagaaaagctgaatattgaaaaagagaaaaggtcaaaagcagttacaacagcagaatgaaaaagaaatgatggaacagattcgtcagcagacagatattttagagaaggaacgtaaggccttcaagacaattgaacagtcacgaactgaggcctctgtcttggcaccatccttntatcagccaagacaaaaagtagagaggccatgttctctgtatatccaggaatactccgagtaaaggagaaagctggtgtacttagggtcccatcagcaggcacctaaaaagagacgcagcttctgccacaaaagaaagtcc

SEQ ID NO: 2707 - DNA, 707 bp, Mus musculus
accgcggggcggccgcggctcgggcggctcgagcacctaccctatcactcacactagcattaagtctatgagttcccctaccaataccacacccattaattaatttaaacctagggattttatttattttagcaacatctagcctatcagtttactccattctatgatcaggatgagcctcaaactccaaatactcactattcggagctttacgagccgtagcccaaacaatttcatatgaagtaaccatagctattatccttttatcagttctattaataaatggatcctactctctacaaacacttattacaacccaagaacacatatgattacttctgccagcctgacccatagccataatatgatttatctcaaccctagcagaaacaaaccgggcccccttcgacctgacagaaggagaatcagaattagtatcagggtttaacgtagaatacgcagccggcccattcgcgttattctttatagcagagtacactaacattattctaataaacgccctaacaactattatcttcctaggacccctatactatatcaatttaccagaactctactcaactaacttcataatagaagctctactactatcatcaacattcctatggatccgagcatcttatccacgcttccgttacgatcaacttatacatcttctatgaaaaaactttctacccctaaaaaaa

SEQ ID NO: 2708 - DNA, 609 bp, Mus musculus
cagatcgcgactggagttttttttttttttttttttggcccatttcttaggctgtgttttagcaaagtatacctgcgtggccatcttgtccacgccaatgcagaggtcctaaaaggactccctctattctctatccctgtggacgtaaagacactggcatctctgttaccttctcttccctttgcaagggttttaactttggaatcttccagagaaagtttggccaatgccagatctcccagagttgggatttttgttattttttttctttgttttaaatcaaatttgtgtctggttcctatttacactactgattgttctaatcccagagatgaatatgtttctcctctgtatgagaagtaagcaccctttatggtgaaacctgtctcttgtggtagaaacggaagccgctgaaaacaaacatcagcacaggagagccccaggcagaggtctcccttgagattcttccgaagcaatcgttggggtctgggtcagtttcacagggttatgccattttattcaagtccgttgctccgtttgtgcagtctccaccatataagcaaaaatgacagccagtacataaggggttagcgtgacaaagagacttcc

SEQ ID NO: 2709 - DNA, 680 bp, Mus musculus
ggctcgaggcggctcgaggaaaaacacacccattatttaaaattattaaccactcattcattgacctacctgccccatccaacatttcatcatgatgaaactttgggtcccttctaggagtctgcctaatagtccaaatcattacaggtcttttcttagccatacactacacatcagatacaataacagccttttcatcagtaacacacatttgtcgagacgtaaattacgggtgactaatccgatatatacacgcaaacggagcctcaatattttttatttgcttattccttcatgtcggacgaggcttatattatggatcatatacatttatagaaacctgaaacattggagtacttctactgttcgcagtcatagccacagcatttataggctacgtccttccatgaggacaaatatcattctgaggtgccacagttattacaaacctcctatcagccatcccatatattggaacaaccctagtcgaatgaatttgagggggcttctcagtagacaaagccaccttgacccgattcttcgctttccacttcatcttaccatttattatcgcggccctagcaatcgttcacctcctcttcctccacgaaacaggatcaaacaacccaacaggattaaactcagatgcagataaattcatttacccctacttcaatcaa

SEQ ID NO: 2710 - DNA, 626 bp, Mus musculus
gggcggccgtggttcgagcgagagcagagcagcgtagagcagcacagctgagctcgtgaggcaggagactcagcccgaggaaatcgcagataagtttttaattaaaaagattgagcagtaaaaagaattagaactctaaacttaagctaatagagtagcttatcgaaatattacttagtcttaataatctaagaagatcttaagagataacatgaaggcttatttaaacagtttgaaaaaggaaatgaggagaaaagtatttgtactgtataatggaggctgaccagagcagtttaggagattgtaaagggaggttttgtgaagttctaaaaggttctagtttgaaggtcggccttgtagattaaaacgaaggttacctaaatagaatctaagtggcatttaaaacagtaaagttgtagagaatagtttgaaaatgaggtgtagttttaaaagattgagaaaagtaggttaagttgacggccgttataaaaatccttcgactggcgcatgtacgtttgaaggcatgagttggaaacagggaagatggaagtatttggagaaagaagattagaaaatggaagtgaaagacgaagaagacatacaggcacggtgacgaaaaaaggctg

SEQ ID NO: 2711 - DNA, 781 bp, Mus musculus
ggctcgagtagattcctccccaggttttgagaccacatgtagcctaggctggccttgaacctttttcttttctttattttttattttatttgcctggtatggtggtactcaaggggaggcaggaggatctccgtgaatccagtctagtttacatagtgagttccaggatagacagccatatgtagagagaccctgtctctaaatttgatattaatgttttgcctgtagtatatatgcacctatatgtgcctggtgtctacagaggccagaagtagttgtcagatccctagaactagaattacatggagttgtgagtacatactgcgaattgaatcctggtccttctttgagaacagtgctcttaactgctgcattgtctcacaggcctggccttgagctcttcatgttgcctccacctcctcaagcgctagaattatagggcatgtaccacccaccatcatacctggtgcttctgattgcattttctatgcctagcctttaatctcagcactcaaagaggtagaaacaggaggatctcttgagttcaaggtcatcatataggtatggggaattgaactctggacgagcagcaagcattcataatggctgagccatctctccaacccattttcttgttttgtttttcaagaaagggtttcttgggctggtgagatggctcatgggtaagagcacctgactgctcgttccaaggtccagagttcaaaatccagcaatcacatggggttcacatcattcgtaatgagatctgattcctcttttg

SEQ ID NO: 2712 - DNA, 580 bp, Mus musculus
ggcgcgtttttcgaggttgccccggcggcgcctgaagggaccaaggtgaggaggaggcaggtgggactgggaagccttgtgtgatgcggggagaccctcacttgcctcctgttctcttctccactgtcacaggtcagagaagaatggcttttcccaggagttgatgccttacaacctgtggtgagtgcattgagacttcccaatgacacaacagcagccaacgtttctgcttggacctgtgagtggggtgtgaaaggcattgggggaggagacccctggtcacattaactccactcaatcccatttctcagctctacaccaaacaccctgaatgaggtcagccagccccagcactgtgtgaggcattctcaggactaggaccaggggcctggctgacctctgccttctctccacagacccactcacacccaatgtgtctgctctgcctctatgcatggcatggcagtgctgtggttaacctggcctggctccagtggtcccttggggcatgggacatgccatgcccaactctcagatgctggactcctttcatgggtagcaaccgctgtctgcctaggct

SEQ ID NO: 2713 - DNA, 836 bp, Mus musculus
gggtggcggtgctgttctcgagatcgccatagccttcctaacattagtagaacgcaaaatcttagggtacatacaactacgaaaaggccctaacattgttggtccatacggcattttacaaccatttgcagacgccataaaattatttataaaagaaccaatacgccctttaacaacctctatatccttatttattattgcacctaccctatcactcacactagcattaagtctatgagttcccctaccaataccacacccattaattaatttaaacctagggattttatttattttagcaacatctagcctatcagtttactccattctatgatcaggatgagcctcaaactccaaatactcactattcggagctttacgagccgtagcccaaacaatttcatatgaagtaaccatagctattatccttttatcagttctattaataaatggatcctactctctacaaacacttattacaacccaagaacacatatgattacttctgccagcctgacccatagccataatatgatttatctcaaccctagcagaaacaaaccgggcccccttcgacctgacagaaggagaatcagaattagtatcagggtttaacgtagaatacgcagccggcccattcgcgttattctttatagcagagtacactaacattattctaataaacgccctaacaactattatctttcctaggacccctatactatatcaatttaccagaactctactcaactaacttcataatagaagctctactactatcaatcaacattcctatggatccgagcatcttatccacgcttcgttcgaaccaacta

SEQ ID NO: 2714 - DNA, 444 bp, Mus musculus
ctttcgaggccctgtaattggaatgagtccactttaaatcctttaacgaggatccattggagggcaagtctggtgccagcagccgcggtaattccagctccaatagcgtatattaaagttgctgcagttaaaaagctcgtagttggatcttgggagcgggcgggcggtccgcgcgaggcgagtcaccgcccgtccccgccccttgcctctggcgccccctcgatgctcttagctgagtgtcccgcggggcccgaagcgtttactttgaaaaaattagagtgttcaaagcaggcccgagccgcctggataccgcagctaggaataatggaataggaccgcggttctattttgttggttttcggaaccgagccctcttcagtcttcctgttcacccctgctccactccctttaaccgcaaaactaggtgctgtggccccagactag

SEQ ID NO: 2715 - DNA, 822 bp, Mus musculus
tatcgactactataggggttttggagctccccgcggggcggccgtggctcgagagcaaacaaaaagatgtaggttgcaaatgttaccagcatgtgcagggtgtgtgtgtgcctatgtgtgtctctgtgtgtgcatatatatgtggtgagcatatatatatattgtgcagctagggtgaagccagcaaagaggtgtgtatgttgttatgagacgtttgaaaagaagctgactgcttgataatcattctcaggtgtaaagctccaagtgtaaataaaagtggcatttaacaaattttttcagaacaaagtccagctgatgatctccagcaagcagtaagctaaaggaacagctgagagccgccgatctgcacacagtgcagaggggtcagctctgtgcttcactgacttggataaggaagggatgatgggaaatcatggaattaagtagtatttaaacaaaagtggacgtaatagctcttctgtttgagtaaagccttggtgttgctttatcttagtttacatttttactttttaaaaagcagcaacggatgcttttaaagaagtattgtgactgtagcactgggaaatgtggcccgtgccccagcttgttgtagctgtggcatagagttgggcaaaagagcggtgatggactcattgcaaccatacatacttgaagagtccattgaccgaagctctttatagactgttttgtaaatggggaaatcacagactgttgaacgcccgcctgcactctaacgggtcctagaagctgtggggacctctcctaataatgtcagacctggactttttctttttgtttaaa

SEQ ID NO: 2716 - DNA, 704 bp, Mus musculus
tgtttttttttccggaggcgctcgagtaatgttggtgttgggatggggcaggggagggggctctttgttgggttaagggtgctgcagagatggcttgagggtcaggagtacaaagccttcctgtagatggccagagtttggattctagtgctcgtgctgagtggcacacactcaaacattactctctcttgggagtctgacatcctccactgtcctccatgggcacccgtgctcacatgcacagacgcaaacacagttgtcatacatgccaccacacaaagacatacacatatgcacataattaaaaactaaaaatgaatcataaaaaacaaatgggtacatgatatggtaagataaatgagggggaaaaaaactaaaaatatgcttttgtcccaaatatctcattttacaaggtagtttaaattgtgttaaaatcactagcaagaagtatatattttcttggatttttattttcattttcctttgcctgtatttatcaaagaaaaagaccaaaagatgatggtaaaacctctgtttctatagatttattttatacatgtttaattattgaatcacaaaatggggacatatcatcaaatcccaagggtaaacagtgctaaataagcatgtatgaaattgaattggttgtgatggctggtggggcggggcaaagagcctaccatctcttgctgagacatcagtta

SEQ ID NO: 2717 - DNA, 503 bp, Mus musculus
gcggggcggccgtggctggcttctccgtgtgcctgacacttggtctgggtttgctcttgctgagtgagtcattctgtgacatcagctaatttctcttcaggactctgactctgactgagattcataagaaagagcccttggtcactccaccaatccagacaggagcaggtgtccctgatcccagccttctgctatggaggaagttgtcactaaccacgtgggcctcaatagtctttttctgacccagcctatttcaggatagagttacatacttcccaatagcctgaggctgtagctagttctctttctagcaaatatttgggcgcttgacgcatttcagacactgtgccaagatcagggatggatatcaggtgagcaaagtcggggcgtgatctgtagctttagaatggctctcgtctgtacagcatgctaccattgcagtaggtaggtgtgtgtgtgtgtgtgtgtgtgtgtgtgtgtgtgtgaggcgtgtgtggtgtggc

SEQ ID NO: 2718 - DNA, 741 bp, Mus musculus
cataaatcagacaagcaacattcttgaagaaattttaactggcaagtggaaatgttttgaacagttccgtggtctttagtgcattatctttgtgtaggtgttctctctcccctcccttggtcttaattcttacatgcaggaacattgacaacagcagacatctatctattcaaggggccagagaatccagacccagtaaggaaaaatagcccatttactttaaatcgataagtgaagcagacatgccattttcagtgtggggattgggaagccctagttctttcagatgtacttcagactgtagaaggagcttccagttgaattgaaattcaccagtggacaaaatgaggacaacaggtgaacgagccttttcttgtttaagattagctactggtaatctagtgttgaatcctctccagcttcatgctggagcagctagcatgtgatgtaatgttggccttggggtggaggggtgaggtgggcgctaagcctttttttaagatttttcaggtacccctcactaaaggcactgaaggcttaatgtaggacagcggagccttcctgtgtggcaagaatcaaccaagcagtattgtatcgagaccaaagtggtatcatggtcggttttgattagcagtggggactaccctaccgtaacaccttgttggaattgaagcatccaaagaaaatacttgagaggccctgggcttgtttaacatctgggaaaaaagaattccgattata

SEQ ID NO: 2719 - DNA, 662 bp, Mus musculus
ggttcggcttgggaataatacttttggcaccaggatatgggacttgtgggagaaagcagggctcagcttggcattggtgggttgaaggagtcggggtgcgggtgaggattgtgcctggaaccgtgggttgatgggaataacagtttgggaactaaatagttcacatgaaaatctaaaggctgatggtaaatccctgcaggtggcactactttgagatgcagttgcttggaaaataccaaaatcctacaaggggaagagcaaaattgttttgcttcactgttgaatggggaagggtgacattgaaaagcttttcttagttgctcaatagatggttgtcactaccctgacctaggcaggccacaggggtggagcctggtggggggaagctgattgccaagaagtgaagctggggaggggcttgtaaacgcctcccgttgtgggctctgaaaccatagtatggggaggttggcagactcttctgggtctctattgaaattctgtcatactgtgtgattaagaattccaatgctgctatctaaaggaatttcatatgggagtcatgccttatacaacacatacaggaatttaatgtgtgagccatgccttcaaaacacatcttgaatttctggaatcggccagaagacaacagggtttgcttatta

SEQ ID NO: 2720 - DNA, 825 bp, Mus musculus
ggggcggccgtggttcgagtgggcagatatctatcttctaagctattatcctacctccctatctacaaccgggaggtataacttgccatgtgccacccgagctgctcttaactccaattgtccagccttcatggccctgttttcatagctcaccagcctaatggtgacttctcctctctccaccttcttttcttcttcctctcatggtctctcctcagataccaagcctgggaaccagaaactccacctatgtctcttccgcctagctgtaggcatctttatttgtcaatcgaggacaacttgggggtcaaagttacatgggtcacttgggtcaccgtgtggactctcatccctgggcatgaccaggccttgtgggccagcacttagcataacaataatagcaaaagaccaaaacaagcatcagcaagcatcagcaaacaagcctcaacaactgcttttcattttcatccacagtatcctgactgcgctcccatgcattagggtttagctgtagaacaccttggcagatccaggccaaggaaagctgcaaagatcacaccgtgtaacagaactcactccagatttactgggagaagaaaggtggcctctgagagagagacccagagagaggaacagagacagaaagcgagaggcagacagagagacagaaagtgaccataactatgccccaggatccatgtctttcccctgccgtcagaacacagggcctgtaccttgaggccaggtcccactgtgctgagtccagctctctcagggacagagttaagaaggcttgtgggacctggttccttccatggtctgtgg

SEQ ID NO: 2721 - DNA, 705 bp, Mus musculus
gggccgtggttcgagattgatgagagaattcaagttgaaatgtgcttcacccacacagctctggagtatttaattattgtttctactgcgagtattgaggtcttcactgaggatatttttatttatacggtaaataagtagttaaaatttgttatagtttaaataccagttaactcgacaagttctttagatctagctgtgaattcaagttgtgccatataggatgtaagataaaagtattgctttgcctccacaatagaacctcagttataaggagaaaagggaatctggcacatttttccatgccgaagctgtatcctgaaggggcaaaatgaagatctttaatgagcatgccctaagcctggagtcttgttgctgcattgccattcaggctaaacaactggcaagtgatagtctctcagtactcatcactagggatgttctacactctaggtaacagcatgacgacaaaccttactgagtattcgtgactataaacacatgccacttttgacagtgttcattgcttgactctgcctacaaagcatttacctaattgcccaagcctcaaaattgagtcttcaaagtatctttaaaagcattttaactttaaatgaaacaatcacacccgtttctgggccaagggaagtagttctgaaggaagatggggcattaagctttctcatctctgaggacgggtcctta

SEQ ID NO: 2722 - DNA, 328 bp, Mus musculus
ggctcgaggccccagaacctttcctagtgctgaagggtatgagtaacgtaatccatgctttccagcaccctgagaaagactgagcccccttcccgagctacactgagctttcctttcctcttcttatttattttttattttttatttttttgacaaggcacactacatccatgtgttgacatggcatgtgttctaaattctattcaagattctgtaacctcagctgtgtgacacactttaactgatgtgtatccatcagcttgaagtggacaggaggaaaatattctaccagagaagcacttgaaatcttctgatgaagtagttcaca

SEQ ID NO: 2723 - DNA, 767 bp, Mus musculus
ggccgtggctcgaggggaggcaggttccaagtacctgaactctgggaggtattccagactcatttagttcctagtatagcctttactgttttgccttctgctgttcatgggtacaattacagagcagcttggctttttagctttttccccctctcctgtagcccctaatacattcatctgctctgagaaatgggtccaactgccctggttacctaggtgaaagatgctgcataaatggccatgttgttgctgtagactcctggctatgggtgggtgtgctttcagaaagcaaacacaagttcctcagcctcctgggcaacaaggaaagatattctggccttctcctatgacagagacagacagacagacccagaagctcaacagctcttccttctcagaccagtgccaagcccttcatctggcagagtaacaccagcgtgactggtttgagtcaaggcctggcttgtgcgtgctgacggctttctagccttctgttgatagaaggctagaaacaccagtgatgttttctgtgttcaccttttgaggtaaagttgtatttgttatgcagaaaatgtgtaggtaaaaacatctatgacctctctgccaccccaagaattggtaaaattagctttcagttgtctgtctgtttccagctatgctcaaaaatgtctgcccctgagcaaactggaataggcatggctgtcctggagacaccaccggccaaggtaaggggatggcttgttagacttcctgttctgaccatccga

SEQ ID NO: 2724 - DNA, 724 bp, Mus musculus
ccacggaggtcaggctatctagctgattcagccttggactggctcccttggcttttgaattaaccaggtgtgtgactaagtttacagggcttggctttgtcactgcagacacagcaccttagagtcttataatgtaggataactgtataggatacagtgtttggccatttcggttaaaactcagggtgccatttgatgcagctatgataacagcacagattctggtctcttctaaaactgtgtgtagccctgaaaacacttctgactgaaaatacttgactgaagatggcttccttggaataactacatgcattttatttttttttttaagaattgtctatatagatagcattcgctaagtaaagacattgttggtgaatgctccccaaaatagaagtgtacataatggaaatataaaagatctattgaaagatatgccaaagattattttttaacctatatgccaataatgcacatgatcttacgtaagaaaccaaagaaaggttggtttcaagatactggtgaaatagatggtccaggaggataatggtctaccatggtgcttcctgcttcatgaaatagcttggcacagaaggggttagatttggggttatttctctgcgctcaagtaaattttctttaaaataaaaaaatgccatccttaccccaaggcaagtaagcatttccattaagtctgagatgtgttttaggagctatgtgtgaa

SEQ ID NO: 2725 - DNA, 735 bp, Mus musculus
gtccccagcccgctggtttttctcatcatccatagccctcaagacaagacccatccttccctgcatttcacctgcttcctctactcaccgcctttgggacagaagcccctcggagctcacagatgatccaaggacagccagccagtctggaatggaggctgaactcccaagtagtttcttcccctcatctacagcacgcacgtttgacctgcttcccaacacaaacatgaggctacaccttccagaagtgcttcagacagtgctgaaaagagcactgtcaccccactccacacatgcatctagagctgccatcttgggaatggccagagccattcccactcaactcagagcaacctggcaggcagagcaatactcccttctggcttgtgcctagttagccttcccttgaacaggaagtcaataggaactgtaggccatgtacccccaggttgtctccagggctgtgctgtcactagaagatctgagactcccagctatgggctcagctgaatagtgccaggaaagcaagagaggaaagtgatagactagagtgtggcctttgaaactaggctgtaggacaccccagatttcccctgagaagttagctctggatggtcagcaccttcatttctcctggtctcagagtcccctctgtaagtggcctgagagcccatgagtagcacatgagctgagtggctcatttgtcagacacaggttatatagcctgtccactgg

SEQ ID NO: 2726 - DNA, 832 bp, Mus musculus
acataacagccttttcatcagtaacacacatttgtcgagacgtaaattacgggtgactaatccgatatatacacgcaaacggagcctcaatattttttatttgcttattccttcatgtcggacgaggcttatattatggatcatatacatttatagaaacctgaaacattggagtacttctactgttcgcagtcatagccacagcatttataggctacgtccttccatgaggacaaatatcattctgaggtgccacagttattacaaacctcctatcagccatcccatatattggaacaaccctagtcgaatgaatttgagggggcttctcagtagacaaagccaccttgacccgattcttcgctttccacttcatcttaccatttattatcgcggccctagcaatcgttcacctcctcttcctccacgaaacaggatcaaacaacccaacaggattaaactcagatgcagataaaattccatttcacccctactatacaatcaaagatatcctaggtatcctaatcatattcttaattctcataaccctagtattatttttcccagacatactaggagacccagacaactacataccagctaatccactaaacaccccaccccatattaaacccgaatgatatttcctatttgcatacgccattctacgctcaatccccaataaactaggaggtgtcctagccttaatcttatctatctaattttagccctaataacctttctttcatacctaaagcaacgatatcctattatttccgtccaatcacacaaatttggactgaatcctagtagccaacctacttatctaacc

SEQ ID NO: 2727 - DNA, 817 bp, Mus musculus
ttggctcgaggcggctcgagcaacaaagaggtggaaatcctccgaaaacagtgtaaggccttgtgccaggagctgaaggaagccctccaggaagcagacgtggccaagtgccggcgggactgggcctttcaggagcgggacaagattgtggcagagcgtgacagcatcaggaccctgtgtgacaacctgaggcgggagcgagatcgagctgtgagtgagctggctgaagcccttcgcagcctggatgacactcggaagcagaagaatgacgtcagccgggagctcaaggagctcaaggagcagatggaatgtcagctggagaaggaggcccgattccggcagctgatggcccacagttcgcacgactcagccatcgacacggattccatggagtgggagacagaagttgtggaatttgagagagagacggaggatattgacttgaaagcacttgggtttgacatggcagaaggcgtgaatgagccttgtttcccaggggattgcggcatatttgttactaaagtggataaaggaagcattgctgatggtcgcttaagggtcaacgactggctgctgagaatcaacgatgtagacctcatcaacaaggacaagaaacaggccatcaaggcactcctcaacggagagggagccatcaacatggtttgtgaggcggaggaaagtccctgggtgggaaggtcgtcacacctctgcacatcaacctcagtggacagaaagacagtggcatcagttggagaatggagggtatgctgccgcagggtgcctggagccccgctgccaaggggggtgcctcgccggg

SEQ ID NO: 2728 - DNA, 696 bp, Mus musculus
ctactattgggtgttttggagctccccgcggggcggccgtggctcgagtgaaggcttgcacctttcacttgcccagaggaagctctgacgaagggggtgcatcaaccagctcctgtgtaagttgtctaaggagtccgaggcagcccccagcagctgctgctgtcactgccgccacctcatatttgagaagtcagggtctgcaattgcttgacagtgtgcggaaaacctcccatccttatgtagctgacaggggcttttcgcggaggagaaagtcactgaatcctgtcagtgtaggtcacctccagctgcctgacaaaatcagcccatgaaccccatggaagccaaccccaactgaagctgagataatcagaccaggaagtgaaaatgacattcaaactaaattatttaaaacaaggcatacctctcccaactcagtctaaagacacaatttcattttgagaatgtttacagcccatttaattaatcagtgaactaaaagtcatagaaattggatttgtgcaaatgtagagaaatctaccatattggcttccaaaatttaaaaattttatgccacagaacatttcatccaaatcagatttgtacaatagggcacctgaaaagtgactgcagcctttgggtaatatggctttctttttcctttttccaggggtctaggtacattaatgaggaacagaa

SEQ ID NO: 2729 - DNA, 749 bp, Mus musculus
ccacattcatagctttccaaggatgtatgtggtcctgcctcaacatatcagagcctgacagatggaagcaccttccagtaaagcatgagttgtgtgcttcgtgccgagctgactctcaactgtgcctgccccttgtagtcccgaaatacaagcaatgtgctgctgagggaaacatggaaacttgggaatggagtctgggggtgcctagatggggctttcttttaatgagactcttgaacaatatctcgtaattcagagggatcttctagccctggccactggcctgtacacaagaattgggacctcgcttgggatctggctagaattgcaaaatcctagcccccacccctgccccaccccagtgtgccagttcataagaatctgcattttgacaacatccacagggacattgtccagtcatttcaggacaactggtcttaagagtttccaacctttgtagaacatttaaatgtcggttaataataagtagcaggccatgttaaggccatttattatcaagaaactgaggaattttctctgcatagctttgctttctggatacaataaaatgagaaggtacacacctctagatagtgccacacagagtccagaagggttttgttttaagtaagctaggaatgagttcatatgttagtgtaaggaacaaatgtattatatgtgtatcttttgtaaagaaagggttttctttacgggtttgtaagctcagcatatttggacatacttattca

SEQ ID NO: 2730 - DNA, 538 bp, Mus musculus
ctcgaggctgcgtcagttagtgggtgcaactgtcctgttgtatctagcacacactgtttggctgtaataattcactctggctctcacattctttcggctccctcatctgtaatgatccctggtcctctgagagaagaaatgtgatgtgtgtagatgctccatttagaactgagccctccagaatcacttattttcctacatgttgaccagttgtgtaatctattcattataatctactgcaaaaacagtaataaaacccatcttctgtgatgaagatacatttttctatgggtataaagtataccctttaacagaataatagtaggttagtagaaagtctctccacattaatgctgccagtacttgggttttatcttgtgggttgtgtgaaataggcctgaaatccagtcacagtggttggttattcttgccgtactcatggctgtgtcttgtcagactgatctgtaattgtagctcagtggcttctcatgctgggtaaacacagctatcatctagcactatgatatgctagccagtt

SEQ ID NO: 2731 - DNA, 765 bp, Mus musculus
ggctcggagacatgctcatatgcgctgatgactgtcctaccccgctttgtttctgtccccaaggtctcatgtcatagcatgcccttttctttgaactctgtatgctgagctaaagcgctgttttgttctgtttctcttaaagaggaccgggtcaccttgtttgtttctgcttttgagcatgctgattttttcaagagatgtaaatttattcatagaccacagtgccttgacttaacccacactgccaactggagcaccagcacgcgaatgcacaaaccggtttaaggcactgtttctctctgccttttgacatgtatccaaaaattatagcctactagcatttcatcttagtatccagtcgttcagcatgatcactaacattccccgtacttagctgttgtttaagtataaaaattgatatgtctatactgtgtctttctttttcctttctggtattaagaagagccatagctggagagatggctctgttttaagaatgcatactgctcttacagaggacctggattcagttcttagtgcctaagccaggtgtttagttcactgcagcctgcagtgccagctcctgggggtacaataccttcctctgatttccaagggcacctacgtgcatgtgaacattctttctcacggatacacatacacacatcatttgaaattaaaaaaaaaaaatcctgtgaaaaacaaaaaaggaaccagaaataagctgattactacataaacaattgtctacggcccaaaaaaaag

SEQ ID NO: 2732 - DNA, 747 bp, Mus musculus
ctactatagggcgttttggagctccccgcggggcggccgcggctcgaggcggctcgaggaagaaccctcactagtttctgatacgatcaaggccaggggcggggcataatacagaaaggaggaagaggaagggaaagaaggaagggaccactgtcatagctgagtagtagtttctgtgaatggtagcatagctcagaggttctgagcttgtcctgagccatcactggacatgctggctttgtgtaagttcttcttaaatccacttgacatcacgacattctttcccttggcagcgggtccttcctacgtaaaacatcagaacaggttgtttatcagaagataccaagatccataatgtatcagccaggtttaaaaactcttgacatgtttaatgatgaactcacaggtcaaccaggctttctgacgtcagtccccaaaacccatctgtagatcagaaccttgccgaaacctctgtgcactaggcgctacttagggcgtttcatttctactgtccatacttgtctctacgagacatgagaaagtgcaaggctgcgagagggggttgggtagagctcggagcaggtacatgacatgtcatttggtccctttgatgtgctgggtagagttggcgttgtagagaccgctgtgttcatgcaatcactaattctatgttgtatacaaataaacagctaaaagagaaaaagtaaacccattaaagctattaaactatatgttcctgccaaaaaa

SEQ ID NO: 2733 - DNA, 780 bp, Mus musculus
tggctcgagctacacttcagctctgctcacaagccagcaatcgaaaactccaatctggtttaaaaggatgaatgtgaagtacgaactagcccgtgacaatatatgactaccgagtactacctgacggcaggcacttgtcactttgatgttggagaaagagttaaaggcatatgcagagttggcagagaaaccgagacaagacacagaggaaaagacactcggttgtgtccagtgtttttaggacgaacttctaaagaactttgcgatttgcacatcttgagtttataatttgtgtgatattcctgcagtttttatctaataacattgtgggaaaggtttgggagggttacaagagcataaataaatgtagcaaaattactttctaacctgcctagaccctaggcccttcttagaaggttctgtcccctttgagacttcattttgtcatctaccacatctgtcaccagaagccaggtctgagggtcttcttcagcgccattgagagtttcccatatagacattttatatatgtgagcaagtattttcatttctggaaaaaaaagtgttaaatttttttttaaaagaaacttatgtttctatttgaaatccaactaggatctaatgtttggtacaaaactccagaaatggtattttcataaagtcacaagttttcattcccagaggtcaaaatatcatttgggggttctgagtgggtcttaaagtactttaaccctagttttataaatggggagaaggttttaaacattttttcttggctta

SEQ ID NO: 2734 - DNA, 505 bp, Mus musculus
acctgaccctctgcctccctgggtacacgtcttgcacatctcttgaacgggggcaatgcctatgtcgtttactttacagcagaagaatgggaggagaggagatacattgtcttagttgttcccattttaaaaaaatatatttttacttaattttactttgatgtctcatttagacatcaccaactctccctttgtgttgctggccaaagcattcccaccatttccaaaaccatacctgatttcacataaactgctaacttaaagggtgaatttgcatttacacttagacactttctaaaaacagggtgaaattaacctaaactttgcagtgttgagttattgttatagtcgctgccctagagttgcaaaaacaagctgtaaaagcccatcccctatctacttaatccagattgcctggatttaatgacagttaaaagagtgctgtgtgtgctgctgttttgtgtgctgtgctgtgctgtgtgtgctgctgctgctgtgctgtgtg

SEQ ID NO: 2735 - DNA, 737 bp, Mus musculus
ctcgaggctcactccttcatgtcggacgaggcttatattatggatcatatacatttatagaaacctgaaacattggagtacttctactgttcgcagtcatagccacagcatttataggctacgtccttccatgaggacaaatatcattctgaggtgccacagttattacaaacctcctatcagccatcccatatattggaacaaccctagtcgaatgaatttgagggggcttctcagtagacaaagccaccttgacccgattcttcgctttccacttcatcttaccatttattatcgcggccctagcaatcgttcacctcctcttcctccacgaaacaggatcaaacaacccaacaggattaaactcagatgcagataaaattccatttcacccctactatacaatcaaagatatcctaggtatcctaatcatattcttaattctcataaccctagtattatttttcccagacatactaggagacccagacaactacataccagctaatccactaaacaccccaccccatattaaacccgaatgatatttcctatttgcatacgccattctacgctcaatccccaataaactaggaggtgtcctagccttaatcttatctatcctaattttagccctaatacctttccttcatacctcaaagcaacgaagcctaatattccgcccaatcacacaaatttgtactgaatcctagtagcccaacctacgttatcttaaa

SEQ ID NO: 2736 - DNA, 803 bp, Mus musculus
tgaccttcgtccttcccatcctagccagaactcagtatggcttagatcatccatgggaggcggaggtgcagtagttagaaatcagtagataggaattttatttaggttcctacttttacagcttgtgcgccacctcacagggtgaggtgccttttttccctttactgtcaaaccctcatattcatctattcatccattctcacagctcataggtacaagagctttatatcattcattgaaagtaattaaacagacccattcagaaaatgcctgcagtcatttattgtttagcattggtccaggcttctccacagaatgttcctctcgggctaggtgaggttggtagcatgcagactggaagcaccgttagcctcttcgtttctaaggacagagaaagtggcagcccccgcattccagcctaagctgtcctactgctctttagtttaccttttcccatgtacattgctgagtcctgacggaaggaaggaaggaaggcgctggagaagccaacaaagcctgtgcacgcctccactctgtctctgctctgtgccaactgaagacacccaattggccacctgcttgtggacacacttgaagttcaccggcagacatcccattgttggtttctcagcaggagaggtggctcacccaaatatccctttttctactcaccagcaaggcacttaatctggtgtcacgtgacactcattagagaaagcacctgctcagaatctcatatgaagaagcacacacattctgttgtgttagcatataacaaccttaacgaacaaaccttattctct

SEQ ID NO: 2737 - DNA, 824 bp, Mus musculus
gactactatagggcgttattggagctccccgcggggcggccgcggctcgagagaaactgctgctgaaccaagaggaaaagatctctaacagcagacatccacactggaaacactatttgtcttctacaaaagctgaagtgttcattgtcccagtgagaaagttctgatggctttctaaaaggaagatgtggttgatagatttaggcagattgagggttctgttatttctgagtgggaactgccaagtacagaatgtttaccaaagtatcagtgcatgtttgattacatagaaaaccttgttctagcaaaagtatctgctgtacacagcaagaatcaggaagaatatgggatgttctaaccctgaagttttttgtggcatactgatcactgctggtcaggtgatcatatattctgggaagagctgcttatttgtgactttagcattctggacgtttgtggtatatagaatactcagaaagattggagttaaaatgtatgtagtgtttttctcatatgttctcttagatgactttatgtaatccttaatgctgaaaagaaaatttctcccaaaaatatctgtacatcatatagaaactttgtgagactgagagctaattttcatgtttactatctatttttctatgtggttattttgcctgtcacaatagttcatgtgggccattgaaaatagttacagtcaagaagacaaacaagcttaacttggaaattgttaccaggactttaagaaccaactgggaggggagggagctattcttctgttaagtgtattccagccctaaaagctcatatggcctaccagctat

SEQ ID NO: 2738 - DNA, 710 bp, Mus musculus
gggcggccgtgttgtcgggtaactgggacccaggagaagtgtgaggaagttgtaataggtgggagggagagcatgagaggagctgggagagaggagggtgcagaggggctcagaggaatgaaccacaccaagaaggtagactcaggccttagaaaagagaaaatgagatatttaattcagctgtaaaactatggttctggcaaaaaagaaaaacagtgcctataaaataactgtgagttctatgtcattgataaccatggacaaatgtctcagactgtgttttaaaaaaacatgattttcccacaatggtagacctaatcacctagacttttatagctaggtgaagttagagagcacatggactcagtggagtttgtcctaaatgcagaggttgacagtgatgggagcagtgagtggaaatcaggaagtgatcagacagggctagaaagacttgggagttctcatattgattggaaggttccaaggagtgttgttgaggaggaagtaggtagctgtagaatgccaacaaacattttgaatcaaactggacataccactaatgcaaaatgaaaaggccaagagaggtaaaaccaacagaagttgggctcaccctttataatggagccaggcaggaaagcaaaaggcagaattcaggtttccaaaggggaggggaacgatctccaggttaagcagaaagttaggcagatttc

SEQ ID NO: 2739 - DNA, 679 bp, Mus musculus
  misc_feature (207)..(207): n is a, c, g, or t
  misc_feature (545)..(547): n is a, c, g, or t
  misc_feature (565)..(565): n is a, c, g, or t
  misc_feature (579)..(579): n is a, c, g, or t
  misc_feature (590)..(590): n is a, c, g, or t
  misc_feature (599)..(599): n is a, c, g, or t
  misc_feature (612)..(612): n is a, c, g, or t
  misc_feature (621)..(621): n is a, c, g, or t
ttttggagctccaccggggcggccggtcgggtaaatcagcggggataattgccagcagaaatcagcttccaatgacagcatttgtacatgagccattttctagtaggcagagtccatttcggggttcacctctgtgtgtagagagcctcacagctggagccttatgtacgatgccctaatctgccagttcccccagtcccacccccnctccaagcaagacaggtgttaacatctcagtgaccatctgttctcggttgtggggacaacagccttcatgaggaagaacccccttcagtgacttcccttctgagctctcagccctcctgttctgctgaaataggtactgccttctctgggcaaaggagtagagaagctagcaagagttctgtcctttggcttgtataggttatctgttgctgtgtaagaaaccacctgcaatggcgagggcttctctcggtggggattcaggagctgctgagcatggagactttagcataggctctcagaagatacaggtagtctgggtgtgggcccgctctcatctnnngcagctggagaattccancttttttttgtggnccatcagcagngattccttnccttgatcatatnccccatggngtctcggggtaaagtctgtgccagagcaccctgcttcctcctgaatggttgaccccag

SEQ ID NO: 2740 - DNA, 803 bp, Mus musculus
cccgcaccctgcaccaaggcgaggacagcctcctggagctgacaaagcagatctgcgccttcctgcagacagcaccagagcagttcccctccgaggaattcccagtgtctgagtccaaagtcagtatggatgtgaatttccctggagcagcttttgttgttgtgtcttgcaaagaaagtcagtctggattccgcaaagactcctctttgtacaaggctccgtgggcacgcgtgctcgtctatgggcttggccacaaagtgaagcgtaccggccagctgaacctcattgaggctgcctgctaccctcgagacgcctccccagccaacactgggctcgcccctccacccacagctgaccagtacccttctgtggttctttccacagacaaagtccacatcaaactaggagtgtccccaccacctggagcagtgctggtcttgcattctctgcccctggagttcccgctggcgatggcctttgccgagcagctgctgtcctggaaatcagaggacagtgatgggaagtcagaggatgagcctgacagcatccctgcctccgtcctcctgcacgtggtggaactgctgggaaacttcctgtggactacagacatggcggcctgtgtgaaggagttggtcttccacctcttggctgagctcctacgcacagtacacaccctggagcagcggaagcacccagcaggcctgtcctcctcccatcgccctccagctcaacccctgcctggccatgctgatggccttacagtcagagctgcataagctgtatgacgaggagacgcaattggg

SEQ ID NO: 2741 - DNA, 801 bp, Mus musculus
cgttttcgaggaaaggcaggagatcgggctccgtggagacttgcctggagagaaagttccgaaacgctcaagacaggtcagacggcccccagcgtacgatatgaatgaccatagaccatcgtccttcgggaaagggaagccagcgagtttgtgtgaacaatgcagtttcatggtggacggcggctcagaaattttgtcccaggtagagccaagtctaggacttcgagaatgagagcttcctgacacgccagtccacacaagctcagtcgtccgggagagccatagaacccgcagatcctgtaccttggccaaacccactcggggccagactctgcctagaagacccgcgcagctcagagacccagacacagaaaccacaactccgggttggttcttccgaagcccacagcttagcgttcggcaagggatccagtgtcctgcggcggctttgaaaacgcatgctcgccatgattagattctggaaccgatcgggccctaaacgggggtctcactaacatcctcacagaccaccaccttgtccccaaccttgtgactcctgggaacggaaggggccacacaagccctggctgtgcgattgatacgaagctacaggagcaaacctaccaccatggctctaagacaagtctaatttcgttctagaacccgggaagtgtatagaattccaagagggtctgtggggaataaagtttctcatcaccgcctggctagctcaggtcggtagagcatgagactctaatctcaggggtcgtgggttcgagcccacgttggggcaagtaattt

SEQ ID NO: 2742 - DNA, 604 bp, Mus musculus
aagagcctcccccttcccagtcatttgattcggtagacacaaagcttaatgacagcctgcctgtggaggcagaggtaaaatcctcattagagtgtgacaaatgccacctgtctgaatggtttatgctggcaatgggctgacctggtggttttttaaattatcatgctttttttttttcttccccctagggttgtgggggggtggttcttggacgtttattaacttagaaggaacatagaagttggcagagcgcgactgcctggcagaaaggagctgttttccttttgactattattattttaaactttgatgggtcgctgacgtcagcaaatatgcctgaaacctgcaaagcaaacatgccacatcacaggaggagggcctgcgggggtttggagaacattctctgtccctaacacatgaagaggttgccctgctttaaagaaaatgcttcagacagctggggggctttgcttctaacaaaggatagttttctcctttttttctttcgttccaatcaattctcttcctaagaggtattctctgcgctgagtaggagtagaagcaggattggaggcgggcatggtagaggcagtggttcctttcg

SEQ ID NO: 2743 - DNA, 550 bp, Mus musculus
  misc_feature (382)..(382): n is a, c, g, or t
ggcggccgcggctcggcacttttaggatcaacaaattcaccccagcaggacactgagagcaagagaggggccctcagttgctgagcttactttatcccaacttggcccccaacactgagcatctccttcacagtcggtgctgctgacttcattgtttttgtttcattgaccacttgttagtgagagggggttcaatagaaatgaagtaacttgatttctgtgattgtcatcagagttattttgagattcaaaaggatcatgtgcaaaactaaaaatgataaaagactgagtaatttcacaagtgggtgccaagccctctgagggagctacacaggtccaaatgtcttccaagaagaaatcatgcccatgtattgatgaaaangagatctccctggagatagacttcatggcttctgcattgacatgtatgtaactggctacattgtagcagtgtaagagtgagatgtatcatttcacgaaaaacataacttgagcagacgctcccttgatagattgaatttctcccaaatatgatgattgtttcttcttg

SEQ ID NO: 2744 - DNA, 825 bp, Mus musculus
tggctcgagatttggagatctcggtgtactcttgaggatcaagaacacagggcatttaaaggccttgtcctcacatcagacttaacagcttcttggagatgacacatacaattttataatagctaagtaattatgaaaacctgaccgtagaatgttacaattaattttggtgtttatgcattgaatttgccatcaagtgtatcaaattttagttaaatctgaaattacctcaacaactggagaaacctttgaatggacctgccatttcaaggacttatgaattagtccatatgctctcatcaacattcaattgtgtgtaatgatatataaaggaaagcttttatgtctggctttaaatgaaatgcagagtaaatcctttgtgtttggatgagtgaaatgttttggtgaagcatttgcttaatcagtaagtttggtttaataagtataggctgagaaatggttttgagactgtttgaactttgaggaaatgttgtctgcatagaaatacacacttggtgataggtggaactcgcacagaatttgtttctaagacactcgtgggcaatcctgaagttctcacttttggttttgccttgagacttgtgtggcttgtgtgttctcacagacagaaagggcaataaaactttagcagtttgaactttcccagctccaagtaaccttgtataatatttgaaaaaaagggactgagtcagctagctgggtgtcagtgtttccaaggaggatgaacctctctgcacctttggcaaaatgaaggcttagctatttgtgagctccttctccactgctgcacctaaaatcaactat

SEQ ID NO: 2745 - DNA, 771 bp, Mus musculus
ggctcgagggaatgcagggccctcagttgcctcttctgcacctgcagctctccagatcaaaaacagcacagggaatggccactactccacagccgtgaagacaaatgaaaaggaaaaaacacagtggggttatcatccactgttacaggaagccttagctctgaggacagagctcccatcagatgcaaagctttaacagtacaaagccacaattctgttcaagtgcctttcaagactgtctgagacttctataagcttcaaactgagtagactcttgagaaattcaaattcagggtcttacttcaagtcatagacaacgaacagaaagatgatcatcatcataacgctttattttggttgagtatcccaagaaactcaaccttggcaagctttgtataaatacgtgacctctcctccattctcctcatacatctctagctttaaaaaatgaatgcataatatttcaaaagtatatatttaatatgtaatatacattatttacattatatattatatataaatattttgttatacaacatttataacatataatatataaacatttataagtatgtgttatacataatatatagtatttgtgtatgaatattaaatatatatttattacattatatacgtggtaatatatacactgtgtatgttacaataatgtatacaataataataataataataataataatatcatagtgtccccaagtctgaaagaagagagtaatgacagaacccgggcactgggcataaaagagg

SEQ ID NO: 2746 - DNA, 651 bp, Mus musculus
ctccccgcggggcggccgctgctcgagagcgaatggtggaacaagcagctagagaaaaaactgaaaagattatcagtgcagaactccaaaaagcagctgccaatccagatttacagggacacttacctagtttccagcagtctgcttttaaccgggtggtgagcagtgtatcatcttccccccaccaaacaatggactatgatgatgaagaaacagattctgatgaagatattcgggagacatacggctatgacatgaaggatacagccagcgtgaagtcctctagtagtctggaacccaatctcttttgtgatgaagagattcccatcaagtctgaggaagtggtgactcacatgtggacggcaccgtcattctgtgcagagcatgcatattcttctgcttcaaagagttgttctcaaggttctagcactccaagaaagcagcctcggaagagccctttggttcccagaagtttggagcctccagtattggaattgtctcctggagcaaaagcccagttggaagaactcatgatggttggagacctcctagaagtgtctctggatgagacacaacacatttggcggattttgcaggccacacatccaccctcagaggacagattcttacatatcatggaggatgatagca

SEQ ID NO: 2747 - DNA, 690 bp, Mus musculus
cggggttcggcgggagcatcctagccggggagcccctcgccgctggccggggagtcctaggagccccgtgcaccccgagctgcgcgctttcccaggagtagatctctggagccatggccggactccgcgtcctgctgtgcctcggggcgctgctggcccgccagggctccgcaggactccagcttcttctgaacccatcccgtgccaacttgtctgtccggcccaactctgaggtcttgcctggcatacatccagacttagaggctgtggctatcggcgaagtccacgacaacgttactctacgctgtggcagcgcgtcgggatccaggggcctggtgacctggtacaggaatgactctgagcccgccttcctggtctccttcaattccagcctccctccggctgctccccgtttctctctagaggatgcaggtgccctgcgtattgaggcactgagactagaggatgacggcaactacacctgccaggaggttctgaatgagacccactggttccctgtgcgtcttcgggtggccagtaagtgagactggtggggaaaggcttggggaggtgacggcgagagcctgtggaagaggtcactgtcaggagtgtgggctttagtgacagatgatttcggtctgggcaagttggaggccagcctggctacacagaccctgtcccaaaaaaaga

SEQ ID NO: 2748 - DNA, 486 bp, Mus musculus
ttggctcgagcttctcccgagatcgctttgctgtggtccagcatgcagaagtaagcgtgtggtgaaaggcagcagatccgatgggttgcgaggatgtaagatcgtctgaaggcttccacaccctctcctccagggtaaggcaaatgcgctccgtttcactggcttcgttgagtcatagatgctcttgtctcagcagagtcttggagttggtgcagtgagatcctgtctgtctgtgagaggcttctaaagcttgctttattcaaatcacggactcaaatcaaaatgtgtgaacaatggtgaccaagggatggggatgtgtactgtgcatggagacatctctacacacggtggttgagtgggtttgtatggagtgtgatttgtaggagcagagcaagagagagttcgagaccagctgccttttgcctgaagccctatcgtattgcgaatagtctggtcagaggtcccttcccgccgtcctccgcttcc

SEQ ID NO: 2749 - DNA, 773 bp, Mus musculus
ctcgagatttccccttcctcttcccctcccctctctctgttccccaccccctttttgagacagggtctcacacattgcagctctcaatagatagatcaggctgccctcaaactcatgagatccaccttcctctgcctctgcctctgcctctgcctctgcctctgcctctgcctctgcctctgcctctgcctctgcctctgcctccccctgggtaggattaaagacctgctgtcccacatctggcagaaatctcttttctttttttgttcttgtctttttgttttttctctttcgagctgtggactctacagactctacagccagtggcgatgtcctgaattgtagtcactggaccctggctcccttgggaatcacatgggaacagataaatcttcccaggtaatgctcatggtgttacttgtcggtttctgggtttagccatctgatctaccccagcctcattatgtttaggcccagttcctgttcattctcttcctcctccctgaatctttaggtccatatctggggtggtgctgaaccatgtgatcttctgcatatagcagcagcagtcttcacagcagctgggcctattgtaagagactctcaagaggaggctgttagcccgatgtgctggagaatacttttactcccagaacttgggatggcagagccaggtagatttctctgagtttaggggcaaacccaatctacatggtgagtcctcaggctggccagggctacatatgagacactgtcttaaaaatcaaatcgtc

SEQ ID NO: 2750 - DNA, 708 bp, Mus musculus
ggctcgaggaagagatgtgaggcttaaaggagtcacaggcttcagagtacaagtacccctctgcttctcagctggacaatgcctgaagccaaggaattaaaaatctccacaccctaaccatacctcagcagtggcctcttggctctagacaagagtcttaagaggatgggggggagaaggggagatcacagcaaatgattactaatagaaccagcagttatggtctggtagaaacaggactgaactgaagcctgaccgggaaggtctatacttcctaagagcacgtttctctcacttgggccagaccatagaaaggacaaaggtatgtgactatccttagccctaactcctattctcatagtgaggaaaggagatgagaggaacagacaagggttcttaagcctttccacccacttcccattagtagcagctagtcccaagcctctcctctctggccattcctcatcctttttttttttttttttttcctaccccatcttaaagaacaagacacatttgaccatcaacatcaatcatgctatcttggtgtaggagaggaacagaaaagcaaagaggattgctttcttgcctccaaagtcaaatgcctcttgatcttggaaagggtaagggttggacaattaggtatcaggtaaatttctccatagtttagagagctggggcattacacttcaattattgcctctttaa

SEQ ID NO: 2751 - DNA, 568 bp, Mus musculus
cgctggctcgaggcggctcgaggctgtttgttacagcctgaaatccaggacgaccgcattttctcttggtttctaaaaggaagggaatcttcccgatttttctaagatgttgagtattgtgtaagtaagctttgagtctttgaacctgattgaaatgcaaagcaagggtgactcattgttaggagaagtaaaggccacggaaggtatggtagtttctggagtcctatctgagaactcacagattgtctttgcctctctaggcagaaacagagctacccactgcagcggcctgactgtgcagcactcagctctttggctctctctgaaatgcccgtctcatcctgtctttttcgagcatggctcacaggccttgtgtctgggtgaagggaacccagggtcaggctgcacttctgtttctgtcttttgctcaacagcggggtgtgcactcgtggctgcacagatgaagcccatgctgagtctgtgggaacacccacactcagtgcaccctgtgggtgaccctccctacacagtgcagagcagagcccaggaggggccacaggcatcagtg

SEQ ID NO: 2752 - DNA, 750 bp, Mus musculus
ggctcgaggttcgcagtcatagccacagcatttataggctacgtccttccatgaggacaaatatcattctgaggtgccacagttattacaaacctcctatcagccatcccatatattggaacaaccctagtcgaatgaatttgagggggcttctcagtagacaaagccaccttgacccgattcttcgctttccacttcatcttaccatttattatcgcggccctagcaatcgttcacctcctcttcctccacgaaacaggatcaaacaacccaacaggattaaactcagatgcagataaaattccatttcacccctactatacaatcaaagatatcctaggtatcctaatcatattcttaattctcataaccctagtattatttttcccagacatactaggagacccagacaactacataccagctaatccactaaacaccccaccccatattaaacccgaatgatatttcctatttgcatacgccattctacgctcaatccccaataaactaggaggtgtcctagccttaatcttatctatcctaattttagccctaatacctttccttcatacctcaaagcaacgaagcctaatattccgcccaatcacacaaattttgtactgaatcctagtagccaacctacttatcttaacctgaattgggggccaaccagtagaacacccattattatcattggccacagcctccatctaactttcaatcatctaatctataccaactcagata

SEQ ID NO: 2753 - DNA, 792 bp, Mus musculus
  misc_feature (742)..(742): n is a, c, g, or t
tcgtggctcggcttgaaactgttttttgtttatccaaacagggtgactaagggaactttgacctccaccaactcaaaactgttttcccaaaaccagaatcttaaaaagggaaaaactgaatgtgtcacattgggtcctgcctttgacctttttctaccgttagatgctctcccaacctacaagcctggtgcttgaaacactggctcttttacatcgtgcttccccaggagcaccagagctaggaaatcacaccatgggatcatgtgtttcaacagctccctgccgctcaggctcattctctgtttcctggcttgaatgctatgcttttattttaactgtattgttttctatagttcaagagagatgggtttgtcatttgggttggaatctctgagtgttcttagctttgggctagaaatgatccttttggaccaacttgtgaagctggcagttgaatctgtagaaagtggtggatgcctctctctgagtgaagggaatggggagcttgaaggagtcactaacgagaagagtaacttgcagcaccaggaagactgccccctgagctagagcagagagagcttgagtggtgtgagtctgactgcatggggcaccccttggtcctttggatgtctgatccttgctgtgctttttactgacctgggcttgtactgctcctgagccaataggggcttgcagacccaagatccgtttccttgatgactaagagccccacccttccttntacatttcctctaacctaagtgagcagagttccacctgcctacatcctct

SEQ ID NO: 2754 - DNA, 818 bp, Mus musculus
cacctctccagggactgagcatcattggctcattgtcatggggagctccctcctgaccacggaggctccactggtggtgccacatgggaaacatctacttctcagtctaaggcacactaagtactagtagcaagcctgtgagcctaggagactgtgtgtgtgaggtaaagggtgtagtggtggcctgggctgctgatggaggggaagcaccagtatctaggtgtctttggtaggggtgtatttttattacacagagtttttgaacatatagggaccccaccaagaggctctcctctccccttcttaatcccagtatagactgagtgtccacttcagcaaaggtgttttcatcccagccttggtttggagcttgcagacgtaactgaatataatttcctccatttgcagcatggttcccatgccattggcgcaccagacagaaaagggagagagaaaagacaggaactgatgagatagtttgaaagctgaaggagttctgagtttgtttagttctttattccatctctgtgcggcctcccgagcctacgttcgttccctcctcccttatggtgttggcctcctgcctgctgtcatgtgtccccccttttgctccccctcccatcctgatgctttcatgttggttcctgacacatggtctggctttgggtttgaagggcaagggtggctgtgaaccacccccacccagccgtcaggcccgccttcgtcgcatctctatctcctgctccctggccgtgagggttgggactgaccggggaaggcaccaccggcgagctttgaagcaacaggcccagcctgaa

SEQ ID NO: 2755 - DNA, 766 bp, Mus musculus
ggctcgagccagcataggagtgagacactgcccagtttactcaaattctagtgtacgtgttccagacacattgcacacacagacagaaagtctcctgttccagccccctgcctccctgcgttgtcagtctgtttcagttgtctgaaaacaaaggggacacagaccagggctttaactgcaagtgaactgtggcttttgttcaagagtccgtgttgagagagatgggctatgggctttcagatagaggcccttcagtcttctgtccttgtaattctcttgaagggtgcatgatagaggagccccaggcactcgggagcctcgctgtgctctggggagttcatgggatctaaactctttcgacaccaaacaacagtactacataggtattttggtacaaactgaaagcactagaaaaagtgcctgttgaatggtcctcaaagcaccagagaaacgaggccaggttctccctcctggttgttcagatgcagaagctggacccaggaggcatacagcccatctccaagcttcacttaaagcaaagactcagaacaagaggctcagtcacaggctgcacggccttgaacatgcgcagcgctatgcctggtgctctgtggcccaatttgtgatacttgtgtgcacacagggaagctgtcacacctctcagggcctgaaaacaggactaaacccaagcctcatataactaaccacaccgcaccatccacaggcgtggatggaagtcttcatgttctgttataagcacaactac

SEQ ID NO: 2756 - DNA, 763 bp, Mus musculus
cggggcggccgttgtctcggggtaaatattttaacccaaagcagcttccggctggtagatttttgtcttgatgggctgtccataagaactcccagttctttcccttccttgtgtggctgtaggtctctctcagttatgtttcttagagatcacatctgcttcctggacaaatgttttttgttcaccctggtttaatgggattgagaatgtcttttttccaggaaagtattgatcactaaaataaagaatatgtttttattcccagaggcatcaattcacttgttataatcatactggggggaaagcattaagtaagactttgtttgtaagacaacaaacttgaccagtgtcctcagccaaggaaaaatgatactgcaactttaaattttaaagtaccttgcactgataaatatatttaaaagttatatgtttataaagttattaatttgtaaaggcagtgttacaaaatgttcagtttatattgttttagattgtttcgtaatttttaaaggtgtaaaataacatattttttctttattgaaatctataagactttccgtagtaagatgtctcattttctggtatattattgcttcatgttttgtaccctcataaaattttgtgcaaaattttttttacagaaatttttattttctatgatgatatgtatgacacttgtaaatggtttcaaaatgaacagcgaagccttaactttgaaatggacattggattctctggagttagcatagaaaaccaccttaga

SEQ ID NO: 2757 - DNA, 776 bp, Mus musculus
accgcggggcggccgcggctcgggagaaattgactagagttgctgcctcttccccatcttactctgctcttcagaccccctgtgtgattcagagatgtgaacacgcaaaatacacgcagcattgccccttcgatgttctcatcacataacgttacctctaaaagggaaaatcattgccccagttcccctctcgtccgttgtgtctcacaaagatgggaagaccaacaaaaatgcttcttgatattacaacaatgtgaggagttacatttaactaagtctatagcttgggtaagaaggatcaggtcagtatgagttggtttagtgaagagatgagctagaaggattgcatagttagcactatgtctttaactggtgggttgctgtaccaattggttgcagatctccacagcgtgttcattgcactaaaatgctactaggaaccaaacactaaggccgtcatctctatatctctaagaagggaagttaggccaggctgtagtctcacagtgtggcctgtgtagggttgcatgctactctctaagacattcagacatagtttctgtgcggtgttaggtttgtgcttttttttttctatcttcttgcctgccatcttccagccaatgtgtggttatccagtctgtgtgccaaagtcagccatatctcccacgacctgttagtccagaggagttctgcaccgacgctagttgccagctgcctgctcctaatgtacaccagtcaagacagaataaaatggtgagtttgtaccaagaaaaaaa

SEQ ID NO: 2758 - DNA, 795 bp, Mus musculus
ggctcgagctcacccatctccaatggaacactcacttgtcttgctgaaatggccttgtcctttttgttcacacagtgattataaagaactctattgaaatttcatttacatgacatttcagctattaaacctaaatgacaagagggtggagtggtatagcttattctcttgataaaaaatgtgatgtagcccttggaattttacataaaccactatatttgggagatagtggttttctgtcaaagggccgtaggaaggcttagtatgcctgtgttcttttccatgctttattttcaaagctccctcccctctggcaaaattgtcctgagagtgacagtgaccctgaggggtttgccagactgggctgactggtcagtaccaacctttgctgaggctcaccaaaattggatcattttgatgctgaatgctgttaaccaaggtgtaaatgtactcttcagtgttgctgatctttcttattttttaattgtcattatttttcttgggttattttaaaatgatgtccatgttctctccaggtagctgtaaaaaataaataaaataaacttcatttaagatacctgttagtgctacatgtcagttgtatgtgattgcagggtcaaatgtcattcttctgcctgagggaaaccaaggaaattgtggtacagaggccaccaacttgtcaacttcccaaaatcttttgtgctcaagctcttgattcttctggcccttgtgtattctgcattagcacttaccagtcattagatccctgttctaatggactagcatggactcaag

SEQ ID NO: 2759 - DNA, 797 bp, Mus musculus
ggctcgaggcggctcgagctttattattgttgggtcttggggccaaattgacatacacacacccacgactgctcctctacacacacacacacacacacacacacacacacacacacacacacacacacacacacacacgaagaaaacaagacaggctttgcgtcctaagaagtcaacccagggctggtttggaatcctctagaagagcgctaactgcaaactccctccccccagggcttagggtgaaaagatttcttccacctcttgctacgtgtgatgatctgagctcccattgagccaaacagccattcttagaatgtactagaaacccacacattggcaactaacgctgcaactctcaagtgtgtcctttagaccagtgcattatatgtttctctgctgtctggagagcagggagacttaatggtggtgttcaagtcccttccgttgtacagtagttataggggaggtctaggtgtttttctttactgttactttcatttctgcgggtcagtaagaggattcggttgcactgacaataaaaaaaaaataccaaaatgaaagcggactttttaaaaatccccacctgaatttgctggcactgctggctggatgcttttttgtttgtttgttttgagtttgtattagttgatacaatttacagtaaataacaagattgtatgaaccgcatggtgcttgcagttttaaatattgtggatattcgtcctgcatcggaaacgagctttggtttttactgattcaactgtgttgaaatccaaactttgccgcaacgctac

SEQ ID NO: 2760 - DNA, 654 bp, Mus musculus
cggttgcagggaaactgtctcctccagcttctcctgccttggtctccccatattcttagcctttctatttatttcctggtgtataactttccttgctttaaagggatcttcctttaattccttgggccaatttactggccattgaacagtgtcccttgagtcccaactgtgtctctggggaacctccttacccacccctgctgacctcccacttcccaccctgcagctgagtatccgtgattacaggcgattgaactgtagagtcctctctgcctctgtacctgccagcagcagcctcacagtgacccccacgccactggacaactcccaggagacctgtgcgctccgtgcagctcagctcagccgcctctcaggaagcctggagcaggtctgggggaccccccccccatcactctttacattaagctgagagttgggagaagctgtgctttggctccctgaggccaccctgatccacggggcacccgcacctctgcgttctggattcacagaccaagtctaaagcccgttcgttcctgagttgccgtcaaggcccctgaacggtactctcggtacttctgtttggtttttgtacaaattattagaaaggactgtaaaatacccacttagacactttacctcttcagtatgcaa

SEQ ID NO: 2761 - DNA, 841 bp, Mus musculus
cgggggcggccttggctcgagactgagtgcactgtgtggaaagtgaagagttggcccatgtgacagctggcagctctgacagtggtggtgcatgctctccgtccttgtccagagcctcatggctacctgctgtccaccagtagtgtttctccacagctacttgcagcagcttctagtcagtgtattattttgtaatttttcaaagaaatctttacacagagtttaaagatgttgggtccacacacgggtagggaaaatgctctccatttaaaatcatgtctgccagtcagcagcacatgagaactgtgggagtgtctgttgggattggaagcggcgtactcaagtcaagtgcgcttggctcgtcagcacaagccctgtaggcaccccttgtttactgtgcgcctgctctgcacacacaggcgcggtgctgctcactcctgcctctctatttatttattttgaccatgtgtacattcctttcatagagttagaactgcggttctgcaggctcctattgcagtctgttgtatggtttggatactatttaatgccaggtttatatgttgctggatttgctgccttcagttacttgtgctgtgttccaagcaatctgcattcttgttcacttaatgaatattaagtagaagtaactttgaataattgtggccatttatttgagtttgctcatttagtgcactaaggtcttatactatataacagtaactcctctttttgctcttgagtaattaatgttcatttaccaaacttggaatttcaagatgcactaaagtttcatttaaccggtggctcaaaaaaatgtcagaacttacttttgaataat

SEQ ID NO: 2762 - DNA, 438 bp, Mus musculus
caaatttgcagcacccagtcttcctagactgtaaaggtgccagtgtgtgacaaagtagagttagtgaaaagacatatttatagattatgttaaaatttgtaggaaaaaaaccttaaaaccacttaggaagtgaaattgttaatattccacaaaaacatgacagatgcatacacatggcccctggggggagagaactggaagaggggctggaccagaaccttgctgtttagaaggcagtctgaccacagcctttgttaggtgtgcagtgtattcactgtggtgtacacatgctggggaaaccaaagtgcttactgggaacatctggtctccagccttttaggtgcatgatagacctgatgtggtaatgcatgcctttaattctaggctgaggcaggtggatctctgttctgggtcaaccagggctatagactttgtctt

SEQ ID NO: 2763 - DNA, 751 bp, Mus musculus
  misc_feature (532)..(532): n is a, c, g, or t
  misc_feature (544)..(544): n is a, c, g, or t
  misc_feature (547)..(548): n is a, c, g, or t
tggctcgaggttgctagcagggtaagtgacccctcagagggagcttaagagctttcctatagtctagctctttggggacccaccagactgtgccttgggaattataggagcaacaggctaagacagggtggctttcacaaagaaggcagaggagctttgtctccatgaggacagggctgggaggaccacacttgtccctgtgtcctggacagtggtgtgggaactggaggtagcaatcagaagtctaagtaagccagctgacctctaagcccaaaggactcccccttgcttaccttagacagtccaaccttgggaatagctttaaaaaggggaattaatactgagacagtgaagtccccttaagccgacaagccctccataggtgcacaccgcacacataggcttctctcagtgcagactccaggtggtggtcaacagctgcggcatgcttatctatttgtacgaaatagtgtagggaagccccaggaggtgttatagcttccatataccatgtggcttttgatgtttctgngattttcaacangcnnacaaaagagtcctcgagccggaacatgcgctactccgattttaaacgtggctgggctgtgagacccgttcttggctctggttttacgaagccatcaatacatacacacccttgatggagctgcagatccgttccttttcctgcagcccacttgtgggggaaaagtgccttactgactacagtagccactcagttcaacaggtg

SEQ ID NO: 2764 - DNA, 747 bp, Mus musculus
ggctcgagggtatggagactcgactgaaaatgagttgagtttggtcctctccttttccaaacactcagaacacaaaagtggaatcttctccctacataaaattttgcaaagttggggtgccagaattaaattatgtattaaactcttgtctccatttaacacctttgcagtgaaaaactttttgcttcatatagttaattatattcatattgaatgtattaacagatagcagtgcaaaagcattcttcccaagagaagagtgtaccatgcacgtctgcaccccaggcccttcctgagtcttcaggtgcacacagccttcttgtggagctacttttgcaaatattacaaggtggggggacactaattgttgctgctagtgctgtctaataacgtggtcattggaatctaaggaaactagggtctgtggttaacaccctgggataattgtgatgggcagatgcgcagtaatggcctgtgttggtaacaatattatctagttcaatgccatgcagtagcattgtatagcaactagtgcatttcatactgtattaaatatggcactgcttctaagcctcgttccagttaagtttcacatgacagttagctcctctgacctgtctttctaggtaactggaaatgaacttcaggcttgatacagatcttctccctgttggtattacatatatagagataattctcaatgcctaataatatacttatacatttgttaaggtatgcgcaaaaaaa

SEQ ID NO: 2765 - DNA, 697 bp, Mus musculus
  misc_feature (6)..(8): n is a, c, g, or t
cggttnnnccggctccctgtgggggtccttggtctactggtgggcgatatgggacactccgccaagaaaccctgcgtcacccagctaggtctggcctcagtcccggagctccgcgaagctcagcacagagtggcttcctcccaaagcccggcgccacggtaacactttcttccaacactccctgattttgagttttcttctggagatggtgccctggtcaaagaattattcagagctaagctcttagctttggcccggtcttttcgtgtacttgtgtatttaaaatgtccgggtcaatctctggtagacttcttggatgtcaaacaaagaaaactgaggctgtgagggtggcatggggttgtagctaagatcgtgtgggagataggggaagactcttgtgggagacccacgccaagtggtgcccggactgggtagcgctgacaccaagactgatccacggccatcatctttaggattattggaaaacaacacgcagaaagagctctcctccgggtggaaagtaagaaatgagctcaagggaaaccccctgagccggacggcagagaccttcagctccactccagcatcatcagggctcacccaaatgcttccatcagaaaaagcgaaggagacccgggacgcggggctctaccataaagaggcgggttgagaggaggttgctgcaagattgaattta

SEQ ID NO: 2766 - DNA, 760 bp, Mus musculus
  misc_feature (760)..(760): n is a, c, g, or t
cggtggcggccgtggctcgagtgcgcatttagacactttagaacagctggaaaaggactgcagatgttcagggcgtgtcaggaccaacaacggtgttggactagacaactgacatctaccgaacaggaaggaccctcactcagcttttgacaatcaggccaggttgccagatccaaactggagacatggcaccacccgacaattcagtgttgaccactaacatacgttctcagccaatcctgcagaccaagaaaagctgtgtgggggcagaggcatcctgtggccacagtatcagctatggcaaacttccacacttgtgagctaacaggcccagattcctccatgagcatcttagactcatgtgctgccacgatctgaacagcagacatttcaaaagagggaagacactattcctccctagaggatatcctcatggaagacaaaaatagaaatgtcatctcttcagcttagcattgctcctgatcagaatgcactaagttgtcacccggctcttgcaagagctgcctcctgccatacccaggccacaccccaaagtactgaatagctgtaaccctgatactgtgtctgctaccgtgaccactttcccacggggatggctgctgtccacttacaatgggcatcaagaggaccagcaaaagtttacagtagtgatgacccattgatgtgtcatagagcaaggagtccttgtcctccagagaggaggatttgctgggtagtcctcaaagcatgtagtatagan

SEQ ID NO: 2767 - DNA, 794 bp, Mus musculus
tcccgcggtggcggccgtggctcgagcatagagctggcctggaacacgtcccgccgttggagaaggagcgcgggggcgttagtggacccgcgctcccatcccccactctcagggctggggactcgaaggaggcggagagtagacgggggcgacctttttttgttgttgttattgatgttggtggtggctaaaaaagctacttcgagtttcctccccaattttgcttgaagagactcccccccaccccacccttccaacgagcttccggacttggttgcacccccagcaagaaaagaagccaagcaaagcttctaaagaccgaaggaatcttttcgcctcacccccaccccctcgccttggtgatttcttgtttgattttgcctcatggtcaagaaaggagggggaaaatccagcgtgccccatctcctacccaccccctctttgtattctctttgtatttttccccttcttaaaatttctttttctgcaatgaagacagaaagaaggctctggggtgatgcgtttggcatttgtgttgagcttaggggagcattggcatggagaaactccacgctggcgaagtcccgggctgggctttctcctctcccccaccttttttccccttgtccttgcagctggagatgtgctgggagtagcaggccaggcctcggaaaggacctggggacctcgggaagccacagcaacctggctggggatgcagaagacccgagcccagaggcgttgggtcccggcctccgctgggtctgtgcaaataagaattaaagacaaaacaa

SEQ ID NO: 2768 - DNA, 563 bp, Mus musculus
ttttcgaggcctgtaccctgaagcttctctggaattactgtcgaaaagtaggttcctgtgcaggagttagtctgtctgatggttctgccaatacagagaggggagctggcccgtaggcgtggctgtgtgcaggcccctcagtcacacatcctcctcacgtacggttttcagatgcagtttgcttggttgcgctcttgcccttgaagctgtcaagtgctgcctgtctctctcctcgccctccagctccatgcgttgctctgtgcatgcttgaggccttccccagctcgcgtgtgcaggacagtccattggtaatgtaccctctgaggtacatactccccaggagggcctcgctgaggcctgtgcttcacaggtggccttgagttcctggttttgccctcagaagcacagggctgagcagttgtgcagaaaccgtacctgtaacttggtgcttgttgatgacctgcaggctggtcttgcagggacagatagttatctttcagtttacttgaaagagttctggtttaaatttcttagcctaaatttgtctttatctcactcttcgt

SEQ ID NO: 2769 - DNA, 853 bp, Mus musculus
ggctcgagtcccaatccagtttttgcttcttttttcctttttctttttttgaggcgggcagctaaggaaggttggttcctctgccggtccctcgaaagcgtagggcttgggggttggtctggtccactgggatgatgtgatgctacagtggggactcttctgaagctgttggatgaatatagattgtagtgtgtggttctcttttgaaatttttttcaggtgacttaatgtatcttaataactactataggaacaaaggaagtggctttaatgaccctgaaggaatttcttctggtgatagcttttatattatcaagtaagagatactatctcagttttgtataagcaagtctttttcctagtgtaggagaaatgattttccttgtgactaaacaagatgtaaaggtatgctttttttcttcttgtgcattgtatacttgtgtttatttgtaacttataatttaagaattatgataattcagcctgaatgtcttttagagggtgggcttttgttgatgagggaggggaaacctttttttttctgtagacctttttcagataacaccatctgagtcataaccagcctggcagtgtgatgacgtagatgcagagggagcagctccttggtgaatgagtgataagtaaaggcagaaaaaataatgtcatgtctccatggggaatgagcatgagccagagatcgttcctactgatgaaaagctgctattgcaaaaatttaagcagagaaagaaccagtattaagtaggcaattaccttaaaaagtatggttattacaggttatcacaaagtaagattgtgaaacagtgagataatgtattaaatgcttataagcgta

SEQ ID NO: 2770 - DNA, 724 bp, Mus musculus
ggtggcggccgtggctcgagcagggttggggagcccatttagctggggcttctagaacttctctgcagtgatgtggtttcctcagagtttatcagtctgagtgattgcattagtacaaagaagctagcagacccaactggccttttctcccctgcatcagggtccttatctgctggagcccttaagagggccactgaagcctctggctctcttccaggcgactgacgcattgcactactgagttccctgaagtctgctgcagccccttgtttacgccagcagagaacagagtgataagaacaacattcgagtggacacgcttgacgcttagtgcagcgttcaaaccttgcctggacctggaaattgtcagggccatagagtcccctgtcactgtgtgtctcctgtgccctgcccagctctctgctgtcccctgcagccaccacaagggctaggctgtccaatgagccccatagcttctaagaaatgcagggcttatttgtagtactccgtgacatcccaggtgaagaagcaaaagcctatgatctgatctgatctcctttattctgccctgtccctggtttaggggagggagaacctttctagcaactacggctttgtttgctgcctggtgccttttataagctggcattttttttcatttccttttttaaaaaaaaaaaaaaaaaaacacaaaccaaaattgcattgggttggtggcattgac

SEQ ID NO: 2771 - DNA, 747 bp, Mus musculus
ggctcgagtgaaaatgcctgcctacatcaacttctttggaggtgcaggtaatttcttgcacaggggttatctcccaagtgaggattcatggcaacctcttacagacagcagatgcctgctaccgattgccctaagcttgttttggtggaataagttgaaggaaatactacttggtttggtttgatttgatttggggactgtgctgggaataaaaaaccaaagtttttatgcatgtgagcacattctgttacactgagctacatccccagccctgatcatgttttaaatatctaggacaaaggggacctagaatatgtataactctagatacttctcctagcagttcacatggatgtgcacgcgcgcgcgcgcacacacacacacacacacatattctgctttttaaagggcaatattaagatttttttaaaaacctttgtaatgaaaaggtatgctgtgtgattgattgggtatgttagcccacactcatgatctcagcacaggcagagtcagtaagacaggggtagatactgagttccaggccagtctgggctatatatggtgaaattgtgtctcaaaaataacaaaaagaagtgtgcagccaaatatggtgattcacgaggaagcagaggcaggagggtctcggtgagttccaagacagccaagggctacatagagagacgctgtctcaaaaacagaacaattaaagacaaatgtgcattgggttaggttgtacagtagtaaaca

SEQ ID NO: 2772 - DNA, 850 bp, Mus musculus
tttgggctcaccgcggggcggccgcggctcggtgacagcccgcaacctgatctgcagtggcagcaacgtggcagcgcctgcccgctcccatggacctgtgtgcgccttgctgcccctgcccactcccgtggacctgtgtgcgccttcatcctcccgcatcatcatctttattctcaagaattctggacctgactcgccgttcagaaagggattcctgcggaagcctggtttattcggtgccccgtgtgataagtttcagccagacacgaaaggaatgcagcggttaaagcatagcgacttagcttccaggccgatttccttaagactggggaacgaagaactatttattctgccttaaagggatggcaactgggtggagatgacgtcaggcgaatgtagactatgggtacactcctagtgggctaatgtagcatagagagaaagcaggtaggtgtttctctgttatgtaagcaataactttttctgtgtcttatggagtatgactagcaattatttatttccatgctagacggttctttgcatgtgggttccttataggtgcagacatctcggccaatggaggtccactggccactttgtcatttggacgagctgttactggattgaaattcacataccatttcactaaaaattgtgccttagaaaacgcaaagctgttgcacacagtgacgaacggcagattcggaacaccaaagggagacgaaagtactccctagttcccacgggcttctctcggaggtgtttgctgctttacagggggggaaaaaaatgaataaagaatttaaaagacaattaaaaaagggaaaaagaatccatatcagctatggat

SEQ ID NO: 2773 - DNA, 637 bp, Mus musculus
tggctcgagggatcgatgagtgaaagaaaaaagttaaaattggaaacataaggttctaaagacaacaagtctataggctgacaaattaaaaaaaatttcaatgtagagaagataacaggctttcaatataacgggggaaagtggggcacagattgttctttatagggcatgagtcacgtgggcttccagaccttcagtacagaggaaattcagttgcttctgggtccgtggataggagatgatctgaatggacaaggctaagctggccgtccttgatgccctcgacatttctttacacacccctttgtttcttctccaaatactgtgtcctgtacaggaagtgcctatgcgtattagttcctttcctgtttttctagggcataagcaaagtgtaagaggtgatctccatccactgatcccctacaatttaagaaggaagataagtcatgcccaagaaaggatgagtatattttatgcatatgataagaaatagtgctatggataaattataataaacccagagatttaaagttttctttaaaaacaaaaaccttaaatgggaatattttgatatttaagtgttgtgtgtttgtccatccatcccatttttaggacatgctcagtgatctgcaaagcc

SEQ ID NO: 2774 - DNA, 629 bp, Mus musculus
  misc_feature (461)..(461): n is a, c, g, or t
  misc_feature (480)..(481): n is a, c, g, or t
  misc_feature (498)..(498): n is a, c, g, or t
  misc_feature (511)..(512): n is a, c, g, or t
  misc_feature (536)..(536): n is a, c, g, or t
  misc_feature (548)..(548): n is a, c, g, or t
  misc_feature (557)..(557): n is a, c, g, or t
  misc_feature (565)..(565): n is a, c, g, or t
  misc_feature (578)..(578): n is a, c, g, or t
cgggcggccgtggctcgaagcgagagcgagttggtgatgaagctagctggcggctggcttgtcaactgcgcgaggaggcgagcaggcattgtggagaggatagatagcggctcctagaccagcatgccagtgtgcaagaaaggctgcagggagagcatgcggtgcggtaacattccttgaggtcggcaacatggtggtggttttctgtaacttggatggtaacttgtttactttgtcttaatagttatgggggagttgtaggcttctgtgtaaagagatatatctggggctgtatgtaggcctttgcgggtgttgtaggtttttctttttcagggttatgtcctcttgcatcttgtcagaagcttttgagggctgactgccaaggcccagaaagaagaatggtagatggcaagttgtctttaaccgctcagaggggaatgaatggtagagccagcacaacncttcccagttttgtaaganncgttgtagtttgaacangatgacctaccanncaagcctcactcctgtgtaggggnaggtaattgggncaaagtgcnttttgggnggaatgggggcanaaatatattttggagttctttttcccctttagggtctgggtctagaattcc

SEQ ID NO: 2775 - DNA, 879 bp, Mus musculus
ggctcgagccccattctaatcgccatagccttcctaacattagtagaacgcaaaatcttagggtacatacaactacgaaaaggccctaacattgttggtccatacggcattttacaaccatttgcagacgccataaaattatttataaaagaaccaatacgccctttaacaacctctatatccttatttattattgcacctaccctatcactcacactagcattaagtctatgagttcccctaccaataccacacccattaattaatttaaacctagggattttatttattttagcaacatctagcctatcagtttactccattctatgatcaggatgagcctcaaactccaaatactcactattcggagctttacgagccgtagcccaaacaatttcatatgaagtaaccatagctattatccttttatcagttctattaataaatggatcctactctctacaaacacttattacaacccaagaacacatatgattacttctgccagcctgacccatagccataatatgatttatctcaaccctagcagaaacaaaccgggcccccttcgacctgacagaaggagaatcagaattagtatcagggtttaacgtagaatacgcagccggcccattcgcgttattctttatagcagagtacactaacattattctaataaacgccctaacaactattatcttcctaggacccctatactatatcaattaccagaactctactcaactaacttcataatagaagctctactactatcatcaacattccttagggatccgagcatcttaatccacgctttcgttacgatcaactaatacatttctaatgaaaaactttctaccctaaaaaagattcgatatt

SEQ ID NO: 2776 - DNA, 429 bp, Mus musculus
cacacgtgcgcgcgcatgcttgccctaccttcccccctgaaataattacaaattatgaagaggttttttctgggctactttgaaacaagttgaacaaaagtggtcggtgagtaaaggtgtcctgcagttctcccagactgcgtcataaagtcacactacattgcacaggactgagaagagtttaaagaaatcacatttcagcttcaacagagggtttcaccagcacattagccagaagaatttgggagtgaatcccactacagcgatgctgactgcatctttaagaagtgaccatgatattgtgttcatgtatgtatatacatatgagttgagcctcatatagatatgtacacacatacacataaaacacattgtactgtaatactgcaaggttttttttaacttaccattttattttttatacacatt

SEQ ID NO: 2777 - DNA, 712 bp, Mus musculus
tcgagacacacccaacgacgctcctctacacacacacacacacacacacacacacacacacacacacacacacacacacacacacacacgaagaaaacaagacaggcttgcgtcctaagaagtcaacccagggctggttggaatcctctagaagagcgctaactgcaaactccctccccccagggcttagggtgaaaagatttcttccacctcttgctacgtgtgatgatctgagctcccattgagccaaacagccattcttagaatgtactagaaacccacacattggcaactaacgctgcaactctcaagtgtgtcctttagaccagtgcattatatgtttctctgctgtctggagagcagggagacttaatggtggtgttcaagtcccttccgttgtacagtagttataggggaggtctaggtgtttttctttactgttactttcatttctgcgggtcagtaagaggattcggttgcactgacaataaaaaaaaaataccaaaatgaaagcggactttttaaaaatccccacctgaatttgctggcactgctggctggatgcttttttgtttgtttgcttttgagtttgctattagttgatacaatttacagctcaataacacgattgtatgaaccgcatggtgcttgcagttttaaatattgtggatattcgttctgtatcggaaactcagcctttgggttcttactg

SEQ ID NO: 2778 - DNA, 686 bp, Mus musculus
  misc_feature (224)..(224): n is a, c, g, or t
  misc_feature (444)..(444): n is a, c, g, or t
  misc_feature (454)..(454): n is a, c, g, or t
  misc_feature (459)..(460): n is a, c, g, or t
  misc_feature (472)..(473): n is a, c, g, or t
  misc_feature (488)..(489): n is a, c, g, or t
  misc_feature (496)..(496): n is a, c, g, or t
  misc_feature (500)..(500): n is a, c, g, or t
  misc_feature (502)..(503): n is a, c, g, or t
  misc_feature (515)..(515): n is a, c, g, or t
  misc_feature (523)..(524): n is a, c, g, or t
  misc_feature (531)..(531): n is a, c, g, or t
  misc_feature (534)..(534): n is a, c, g, or t
  misc_feature (564)..(565): n is a, c, g, or t
  misc_feature (585)..(585): n is a, c, g, or t
  misc_feature (592)..(592): n is a, c, g, or t
  misc_feature (614)..(614): n is a, c, g, or t
  misc_feature (645)..(645): n is a, c, g, or t
ggctcgagctcatgtgatacacaagcatacatacaggccaaatacacaagtcagaaaaaaaaaaatcctcccaggcacattgtgaacctgcgacgcttctgctgtagccacaagacctgaaattaagtgccacgatgtctagcccatgtccttaaatcttcattgccaacatgatgcaccatgttttactttagggttgtaccatgattcgattgttcttcttngctctaagcttccgttcctacgcttacttgcttgtatcaagttcaagtgtggctgacactctagcagatagcaggatgtccaggggtggagtgtgcatacagttcacagagtattgtgagtttcaaagatgcataaaaacaatgcaactagctcaatcaagacagaggatgttatgtgaacctcagaagccgccttggtcctctcaggtgtccaatcctngaccccaaancccanncaccatccctannatcggctggcttttnncccttgncagncnnttagacttaagntccttttnncgctagnagnttctctatgagcatactaaactggaatcanncacatgccctcatctctgtnctttcangcttaatcatgatgtttttgtngattcaattctgcgctgctttgtctttcagngacaataacattttgatcagccactgggttatttcaagcga

SEQ ID NO: 2779 - DNA, 843 bp, Mus musculus
gggtggcggccgtggctcgagcttttaaactgcagcgcaagacgaaaaaaggtcagaaatctaacaacttaaatacaccaaatcatggaaagtgtgtttattttttgccatcacaagtgagcagctctaatcatgctttttttacaccacagaccaaagccaatgggaaccctgcctgttcagcccaggtgcagcatgtctcgccttccattttcccagctcatttagcaagtgtatcagctccattgttaccctcagtggaaagtgtcctaagtccaaatataccttctcaggataaacatggacaagatggcatattatgttcacaaatggaaaatttgtctaatgctcccttgccagcacaaatggaagatctaaccaaaacagttttgcctttgaatattgacagcggctcagatccgtttcttcctttacccacagaaaatagctctctcttctcttcaccagcagacagtgagaataattctgttttttcccaactggaaaatagtacaaatcattatccctcccagacggatggaaacataaattcctcttttctgaaaggaggcagcagtgaaaatggagtttttccttcccaagtaagttctgcagatgacttcagtagcaccagtgcccaaccgtctacacctaagaaagtgaaaaaagacccgggtcgaggcccaaatgggaaggaaagaaaacccaagcacaacaaaagggctaaatgggcctgcgattatcagagatgggaaattcatcctgtagcaagggtacagggctttcaccaaccccaggtcctgggtggacaccctgctaaaagggcttaccgcaacccactgg

SEQ ID NO: 2780 - DNA, 499 bp, Mus musculus
tggctcgagctgtccattcttgacaaaaggatctctgcacttacaatgattggtgtatttcttgtccctttgggattcccagtaagccagggagtagaagtgtctgtgagtgttcagaggactgcgcccctttccctacacgtgttgagtgtctgagaataaatgatgaagtctccttgcagctccgctgtgtcccaaggatgactgagaacacttctcactgcatctcattacagcctatgaattggcggtttcatctgaaagcgctgtttttcatgcgcagaacgggtgcagtctcagaaaggacttgtgactgctcactcctaatgtgggggcactctagctctctgagtattgatctataaagagcagcccagccgccccaccaccaccaccacctaccatccaaattctttattgcatacacttatataaggcggagaatcacctcacatgttacaaactattacttctcttaccttcttcacactctcccatg

SEQ ID NO: 2781 - DNA, 854 bp, Mus musculus
gtggcggccgtgtgttcgagagaagcaagggtggagctgcttggaactcttttccagtgcggaggggcctgagctggggagtgaggcggctggttgcaggcagttgcatcagccgggctctgatggttaggaagggctgagggaattctctggggaccacagagcacctggcaacagctcctaggtagcaaagacctgtataggagccccctgggcagaacactgaaaatctggggctttgtgctaagaaggggcctagcatcccaaaggcactagcttagttgtgaaagacaagactggggcctgaaaaagggtaagaagaattttgcatggccacagttgtctttgatagagcagagttccccaccctgtcctgtgaggcctcaaacctggactattacctagattttgttgttgctgttaaattgttttggttagtgtgcaaagaggttttgttgtgacgcttcgtatatctttatttttgtccacctggttgcttctcatccctgtactattgtggcaggccctggtttcccagttgagagaacagccttgtgtgatggaaaaggattgggctttatgggttctgtttgtgggcaggagttggtctgcctacttagattttggtggggtgtgccaccaaccttgctaccttgtctttcccaggtgagtgtacatggtattgtgtgtctatcccttttcctaataagtaaaagtatcccttccacttggtacagggaaggtgagtcttcatcagtaccaggtaatgctaaaggggtagctgaggaaagcttttcctacgagctcagaatctgggtagcttctttcctgccttcatcttgtgcatgactatt

SEQ ID NO: 2782 - DNA, 172 bp, Mus musculus
tcgggcggctcgaggtgaaaaataaaagggtcggcttatgtctgaacttgctgcgtttctgagctagcaccagctcaccaggaaccacggctcaatactccattcatttccacctgtccccagcattagaggtttctcgtctgccagactcacactcctgccaggtttggtc

SEQ ID NO: 2783 - DNA, 679 bp, Mus musculus
ccacttggtgattgtgctatgttgtattgtggtctggggctcttcagggctttcaggttgtcccacgctgtctggaaaccttataagcctcgtccccactgctttggctactctgcctgcaggcattacctctgggctggatgactgtgtgctgaggaactgagaggccctggctgtggtcctcacccttggtttgctgctgaggtactctgggcaggatatgagatgcccctgccctctgctcatgcctctctctatctaataggtcatcctgtggcttccagagtaggtaccgccagcccagctcaagttctctgcttaacgggagtagaataatggcagggcccagtctcctctcagccctctgggctggaggctgttcctccacactctgatccagtctttcctttcatggctgtaccaagtcttagggctccgagccttgctgaggccccttcatgtgactgagcctctgtagccgatacttctgcttggatgtgggtgggacatttccactgttacttccacaaggggttctcctggtcacaactctggaaactatattttgcaggctgttaataggcatccagatgccctcagctctgttgatacactaaagcacgatgtgtggagggctccagatagaaggccttagccagagcttctctctctgccgata

SEQ ID NO: 2784 - DNA, 700 bp, Mus musculus
ggctcgagtaaacactgcaggcagcaaaacaagcctagtccaccccctcatttcttgctgctacatgtgtatttcaagtttacttataggagtctctggacttaaaagtatatgttgtttgcctagacttgttggatgaaataggaagttaactgcttgctgaggtttggtttgctatcattggctgtatacacagatgagttttaaaccaaaatctgatttttttttctggccaggaaactaatttctatcaatttcacaactggctctgatgcctccagtagcctaccagggtcaggctggctgacatttatctttgtagtgctggacagtagaataggtgcctcatgcatgctaggaatgtgctcaaccaactctgacttgaagtgagtgagtgcatgactttacagcacagcagatgctggcctcactgttgcaaaggttttccctctatcgtacctcattgacaaacagcaaaacaaaacaaagtacttcgaagtaataatcatgtaggaagaaaagattgttttaaactgactatcgggcttagatagatattcatgaactggcaggccagcgcatctatcactgggaaatctgcagacaaaaagcatggattccagaaagctcaagtctcgtctaaatataggctaaatgaggaatagcgggggctattcccgaacacctactacgaggaaat

SEQ ID NO: 2785 - DNA, 498 bp, Mus musculus
ggctcgggggagacttaatggtggtgttcaagtcccttccgttgtacagtagttataggggaggtctaggtgtttttctttactgttactttcatttctgcgggtcagtaagaggattcggttgcactgacaataaaaaaaaaataccaaaatgaaagcggaccttttaaaaatccccacctgaatttgccagcagtgccagcaaattcaggtggggattttttgtttgtttgttttgagtttgtattagttgatacaatttacagtaaataacaagattgtatgaaccgcatggtgcttgcagttttaaatattgtggatattcgtcctgcatcggaaacgagctttggtttttactgattcaactgtgttgaaatcaaacttgccgcaacgcaacagaaattgtttttaatttcatgtaaaataagggatcaatttcaaccccctgcttatgatatgaaaatattaaaatctagtcttattgtagttttaaaaaaa

SEQ ID NO: 2786 - DNA, 586 bp, Mus musculus
  misc_feature (197)..(197): n is a, c, g, or t
ccccgcggtggcggccgttgttcgggaaaaacacacccattatttaaaattattaaccactcattcattgacctacctgccccatccaacatttcatcatgatgaaactttgggtcccttctaggagtctgcctaatagtccaaatcattacaggtcttttcttagccatacactacacatcagatacaataacagnccttttcatcaggtaacacacatttgtcgagacgtaaattacgggtgactaatccgatatatacacgcaaacggagcctcaatattttttatttgcttattccttcatgtcggacgaggcttatattatggatcatatacatttatagaaacctgaaacattggagtacttctactgttcgcagtcatagccacagcatttataggctacgtccttccatgaggacaaatatcattctgaggtgccacagttattacaaacctcctatcagccatcccatatattggaacaaccctagtcgaatgaatttgagggggcttctcagtagacaaagccaccttgacccgattcttcgctttccacttcatcttaccatttattatcgcggc

SEQ ID NO: 2787 - DNA, 796 bp, Mus musculus
ggtggcggccgttggctcgagcacatgaggagcaccggctgacagcaagcggttccgagatggtgcttgtaggcgtgcaccaagagtgttagagaaccacggacaagcatggcaaagcagcttgttttgtatttccataatttgtgaactaatgtgaatttttgtatacagtaagccgcatcgttccttacaggccactgtggtaaaaccattcacttcccactttaaccttaggttcctattgcttgtaaaaggttcatttgctgcagctggaatatggggaaatttatttggttttaatggttacatacatgtaagagggtgtacatgtacttacattggcttttgtatatatgtataaatgctgatgatagcgaaagtcttgttttgtgagaatgtctgcattagcagtaaaataagctttctattttactcataatctaatctgtatatatatacatatatatatatgtatatgtgcgtagctgtgtgtctatgtacatatgtagctgcacatatgtacatatccacacagatatatacatatggctgtacagtcatagatgatcaaacagccaaatacctggaagtattagatacatgtttaaaatatcttttatagattttatataaaaatatccgagtatggttttgtgtagaagttctggcaccagctgtacatgagtcaaattcatgtgagcaataaagaagcaatggcagatactggaaaactatttgggaaaagctgcattactcataaaatactgggaactgtgacagaactaagggattatgt

SEQ ID NO: 2788 - DNA, 622 bp, Mus musculus
tggcggccgtgtctcgggttatggttctgactggaatatttcagagtccacggtcatcagcttttgatcatcaactaagtttgctcaatacctgggacctgtggttaattcggggtcaggaagagcacactttaagcactctctgagcagaggccttattgcacactaggggtgtgtacacttggtttgctgtgttccagtggtttgattcagggacctaccaacaggcatggttggtatgctttcaacactcagttactccagttgtcaggatgttaacagaacctcttcctggtcccagaagagtaagttacattctaggtctaggtggctgtggatgtctcggctcagttcagcaaaagcatttttcatatagccaccaacaataggaaagcagtaaggagttttgtgtctggttgtgaaactgagcacacctcttgagtcatgtagccaacgggtgccttctgcttctagagtgacttccttgggcatcttatgtatgaagggcaaggaccgagcaccagcttctgcatctcacagacagattgtctccatcccttcccctgcctagcaggggccctccatgcctttatcctccccctcctgccccgacagcttgtgt

SEQ ID NO: 2789 - DNA, 742 bp, Mus musculus
ggctcgaggtaatttcaatatcgttgttttgtgtattttggtattgtaaaactgtacttattcttttaatcccattccctggggtgtgggtcccctgagttatctaatatcagagtccacctgaggagctagtattgagtatatactgaggagctagtaatctcaactgggaagggctggagttttcaatgggttcagatttgcttcctattgtaattaagtgtaaattaatggcatcccttaaaaattaataacacacaagtttagtgagaagtacagtgattgtggaagaattctgaagcaatgaaagatggctattggaaaaaacagagtctcccaggatgatagcaaagacatagagctgcattaaggctggacccagatataaatttggaacagtagcaaacaaaactagctttacttgagagaacagaaagtttaaatactgtctagcatatatatcagaagaccagagaataaagtgaaaccacaaggaaatggaagttgagaggattttacaaaggaataaacaaagttattaagtttaaagacagattaccaaaagctcaaaggagaaatgtcagagtccagataggaaagtgccttccttcccacccagggttacagttacagatccaagtggctgtacaacacaaacagttccactggatcaaagggaacattcctgggattcagactcagcaatggtgccaacatgaatctacctcgtgccagaagtctg

SEQ ID NO: 2790 - DNA, 160 bp, Mus musculus
ggcggctcgagcctttgcgaactgacggctgatggcgtacactccgggagattggacgtttccaccgccgccggcctccataagtcctggccatcgctgtcatttttctcttgttactttcattttggcaaagcggattaatccctcagcatgcaaggag

SEQ ID NO: 2791 - DNA, 789 bp, Mus musculus
ggctcgaggaaaatttgggcatttttagattgtgctatgtatttttttaaatgttcaatatgatttctggtaattgtcttaagaactggagtgttaagtttattaaaatggtgttgtttgaagaaggggaaactgcactgtttgccattataaaagtaatacaagtgcatgtcccgtcacccactgtcaggcatcagtatcctcatagctttacacactctgatggggaatattgcagcattctcaggactgacatctggaaaaggctcaaatcacttactgctccttgcttgttgactttgttttacaatattgtgcctggtgtcaacttttaagcaacagcactgcctaaaagcaagcagagaacagaatcccagcaccattctataggcaactttttagaattcagatacagtaaatctgttcaagatttatgatgttttatgtaaaaaaaattttgtactacatagctgaatatttttgtttgatttatttgatgtaaggcgtgtgaacattcatttgaatatcacatgttaaagtcaggtatggcacaatgggctctgagaccagcttccccccgcaccccccccccatttgccttgttctaatctctttcttttcaaattgcatttctggtattcataagcagatatttaattttactaataagcatcctgtgtgaatgtactttaaaagccactatgttttagtgttatggtttgtagaatatgaaacttcccttctcccctccttttttgtcttcaaagcataatctctggaaggagaaag

SEQ ID NO: 2792 - DNA, 356 bp, Mus musculus
caattggagctcaccgcggggcggtcgcggctcgagagacagccagtgggtttatgctacagtgtgagctctgcaaagactggttccataacagctgtgttccccttcctaaatcaagttcccagaaaaagggatccagctggcaggctaaagatgtaaaattcctttgccctctttgcatgagatctcggaggccaaggctagagactattctgtcactcctggtatcccttcagaagttgcctgtacggttgccggaaggagaagcactgcagtgtttgacagaacgtgccatgagttggcaagataaagcacgccaagctttagccacagatgaactgtcctctgccctggcc

SEQ ID NO: 2793 - DNA, 848 bp, Mus musculus
  misc_feature (687)..(687): n is a, c, g, or t
  misc_feature (720)..(720): n is a, c, g, or t
ggctcgaggttacacatttggtttttactttgcaccactgtattttctacctaacttaaaaaggtctaaaatcagccacaggtaatattaatttatcaatatattcaattctgaaaccctcaaaggtcacgttattggtttcttctgtgactgtaacgtttatgaactctgggccaccagacctttgtgctctaagtaacttttgcagtgtcaccggttcttagtggcgggcacagagctgtgaagtcattgctatatctaagagttcctcaggtttctgcagtctcggcctaagaaggagatagtttataaaacagcccatatacatacagcagttcaaataaaagcaggttgaactgtttcttctccactcaaggtgaccatacacatggagatttcaaattccagcactaccacagggagcatgtgtgacccctccactgccgagtgaagtggggcggatgctcctgacttgtcttggcagagctgagaactcgggtatggccctcctgtctttctgagggtttaggatggggagttggccttagaacccgatgctgccccctgaggtgctcttgtaatctgagatgctgcttgcctctggaggatcctggtggctgtggtgagtgccctgggagcacctcagagagatgtgtgggctgcagggagcccacaagggcagagctntggcttccatagccttaggtgagcagatggctntagtcacactaacagttacgtcgaacgtgctgttgctcctaagagtttcaccgtataaaagctgaaaaatacatcattacaatgaagctgtctgcacacaggtaaacaaaccccaccaggtctgaggg

SEQ ID NO: 2794 - DNA, 847 bp, Mus musculus
ggctcgagagatcgcgactggagttttttttttttttttttttgacatgaggttgtgttagtaccaggtcctcacacctcacacatcccagagaagtctaccttcaaccctttccccatcctcctgcctccagctcttgaatgcttcccccaaacctccagtactatagcaataacagtagctacagttcagttgacagagatcttgcctaggtcatccttggctacatagtgaattagaggccagcctggacattgaggacattgtctcaaaacaaaaacaaacaaagtctcggtgagtggtctaataagcaagcgtttcccccactcttgattctttgctttccagaaatgtgaaattttgttctataatcggcagcttctgttctgtgttccctcctccatctgcaggagggcagtttcgcctttgcagattctaccccagttggctctggtcttttcaggtcactggatcccccatgaggcagttctgaccctaatactcacctttgaatacttgaatcccacactcctcctacaggccacccaaaacttgtgccaatgcaggtgggattccagatcttccttcatggaaccccgtaaagacgacagaggcatctgctcagcctcacagtgatcgggcaagaacccaacacaagccaggctggggagagcaggctgggagagtatccatcgctttagcaacacaagaaggtcaaatggggggcccgagtggaaagtggccctccctgcatactgcatttgaccagctgggagtcgcccaacagagaggcaggaaccgaccgtacagccacaccacgactagacctactggcccttattatcac

SEQ ID NO: 2795 - DNA, 524 bp, Mus musculus
ggctcgagcttgtctgccctcttctaattttaactgaaaataggtgatcttttgacaataaataggacatgaacaaaaaacaaaaaacaaaaaagcttagcatctctccctaggtgtgatgtgcccatctataattcagctcccggggaggcagaagaaatgggatgggatcatgtcttcagagctctttgtgggatttctcaccagtactgaactcagaaagcagttcagccgccagcgagaatagccaggagcttactccatgtcacacagcaagtcaagtaatacgagtgaaatgtagttgcctgcatgtatgtgtgtgccttgtgtgttgtctaagtagagctgataggagaaaaacagaaaacttataagcctgtttcatttccgttgtttagccagctgttgcacatatgaaagatctcaaatccttatttatgcatcaaagcttaggtttatggttttgtgagtgtgtgtgtgtgtgtgtgtgtgtggtgtttaacaacagggtctcacacatgctt

SEQ ID NO: 2796 - DNA, 767 bp, Mus musculus
agaaagctgcttctcattggctttggcttaaacccattttgcttgttagaatttatagttttgttatagatgtaatttactaatttgaaatgatgttctaacagtgagtcccttgtctagacacttaaaatctgatttgtaagtaatactgatagacatattttcttacatctgagcagaaataaatgcatgtttttagcaaatgtaatgtaaaaactccagaggataagtttacacccaataagatattattttctatttttaaatttgatatttgcccctctttggtagtgaggttgggggcatagtatctatacagagctgtcgctccagagtgacatttatttcccgcagagatgctgagctcacgctgtgctgggcctgtgcgatgtgtgtactttgccagaggagctgaggaaaaccaagacttttcccccatcccccatttggtttccacacacaggttcttctgaatgctgcttggtttgctaagttggtgggcatgtaagacctcttgaagagatggtgtgtgcaaagacggcccatgtttctaggcagttttagcttgtgtcttcacatagatgagagccaactgtcggtgaagtgtgtggtgctccagggatatggtgctggcatggcttggcacccaccccacctttccactcggcaggactcacctgtggtacagccctcaaatcactgactagagtgtatgtctatggcccaggaagtcttgccccctaagtttacccactccccaaaaaaaa

SEQ ID NO: 2797 - DNA, 740 bp, Mus musculus
  misc_feature (680)..(680): n is a, c, g, or t
cggctcgagcagcagcaagcaacactacaactgcgaacactccaagatcaacttccgagacaagcgcagcgccctgcagtccatcaacgagtgggcctcgcagaccacggacggcaagctgcctgaggtcaccaaggatgtggagcgcacggatggggcactgcttgtgaacgccatgttctttaagccacactgggatgagaagtttcaccacaagatggtggacaaccgtggcttcatggtgacccgctcctatactgtgggtgttacgatgatgcaccggacaggcctgtacaactactatgacgacgagaaggagaagctgcagatggtggagatgcccctggctcacaagctctccagcctcatcatcctcatgccccaccacgtggagccgctcgagcgcttggagaagctgctgaccaaggagcagctgaaggcctggatgggaaagatgcagaagaaggctgtcgccatctccctgcccaagggcgtggtggaggtgacccatgacctgcagaaacatctggcaggactgggcctgaccgaggccatcgacaagaacaaggcagacctatcgcgcatgtctggcaagaaggacctgtacctagccagtgtgttccatgccactgccttcgagtgggacaccgagggcaacccctttgaccaagacatctacnggcgcgaggagctgcgcagccccaagctgttctatgccgaccacaccttcatcttctggt

SEQ ID NO: 2798 - DNA, 581 bp, Mus musculus
  misc_feature (264)..(264): n is a, c, g, or t
  misc_feature (565)..(565): n is a, c, g, or t
cttttcttagccatacactacacatcagatacaataacagccttttcatcagtaacacacatttgtcgagacgtaaattacgggtgactaatccgatatatacacgcaaacggagcctcaatattttttatttgcttattccttcatgtcggacgaggcttatattatggatcatatacatttatagaaacctgaaacattggagtacttctactgttcgcagtcatagccacagcatttataggctacgtccttccatgaggnacaaatatcattctgaggtgccacagttattacaaacctcctatcagccatcccatatattggaacaaccctagtcgaatgaatttgagggggcttctcagtagacaaagccaccttgacccgattcttcgctttccacttcatcttaccatttattatcgcggccctagcaatcgttcacctcctcttcctccacgaaacaggatcaaacaacccaacaggattaaactcagatgcagataaaattccatttcacccctactatacaatcaaagatatcctaggtatcctaatcatattncgttaattctcattaa

SEQ ID NO: 2799 - DNA, 708 bp, Mus musculus
gtggctcgaggcggctcgagcctggacctctgggatcgaactctgagtctctcttgtccttaccatcttcattcttccactgttacacccccttatgggtgctacagctttccctctgagctgcagtaacactcacttgcctgctatgcagtgctatgtagaaggccctgggttcaagcccttatctaggaaaacaaccgtgttttgttttgtttttccttcccgattacaacccctctttctgtgtagtctatttcaggcattgcaaagcaatctgcattactgtagaattctgatttaatcccaatgcctgtgaacttcagtggcattcccaatggtttggcctgcttcagcctttctcacaccagtcagcccagctctgccccttgttatgtgacacttcccagtgatgggatcctgttcttctgtccttcagactgttctgtgctcttttccctggttcctgtagtcgtcagctcataaacactctcaccattcctactgcattctgttcttgaaaacacttcgccttgctcactggagttggcccacatccaacaagaatgtcttacatgcagtggataaatgcttgcttgtctagttagatgtctcctgtgggtccctgaaaaatatcttcggtacacgtgctctggagcctatgccacttttaatgctattctctaaatgaaaatctatggtgttttcaca

SEQ ID NO: 2800 - DNA, 616 bp, Mus musculus
gttttttttcgagaacacacccattatctaaaatcattaaccactcattcattgacctacctgccccatccaacatttcatcatgcatgaaactttgggtcccttctaggagctctgcctaatagtccaaatcattacaggtcttttcttagccatacactacacatcagatacaataacagccttttcatcagtaacacacatttgtcgagacgtaaattacgggtgactaatccgatatatacacgcaaacggagcctcaatattttttatttgcttattccttcatgtcggacgaggcttatattatggatcatatacatttatagaaacctgaaacattggagtacttctactgttcgcagtcatagccacagcatttataggctacgtccttccatgaggacaaatatcattctgaggtgccacagttattacaaacctcctatcagccatcccatatattggaacaaccctagtcgaatgaatttgagggggcttctcagtagacaaagccaccttgacccgattcttcgctttccacttcatcttaccatttattatcgcggccctagcaatcgttcacctcctcttcctccacgaacagatctccatc

SEQ ID NO: 2801 - DNA, 809 bp, Mus musculus
ggctcgagcccattctaatcgccatagccttcctaacattagtagaacgcaaaatcttagggtacatacaactacgaaaaggccctaacattgttggtccatacggcattttacaaccatttgcagacgccataaaattatttataaaagaaccaatacgccctttaacaacctctatatccttatttattattgcacctaccctatcactcacactagcattaagtctatgagttcccctaccaataccacacccattaattaatttaaacctagggattttatttattttagcaacatctagcctatcagtttactccattctatgatcaggatgagcctcaaactccaaatactcactattcggagctttacgagccgtagcccaaacaatttcatatgaagtaaccatagctattatccttttatcagttctattaataaatggatcctactctctacaaacacttattacaacccaagaacacatatgattacttctgccagcctgacccatagccataatatgatttatctcaaccctagcagaaacaaaccgggcccccttcgacctgacagaaggagaatcagaattagtatcagggtttaacgtagaatacgcagccggcccattcgcgttattctttatagcagagtacactaacattattctaataaacgccctaacaactattatcttcctaggacccctatactatatcaatttaccagaactctactcaactaacttcataatagaagctctactactatcatcaacattcctatggatccgagcatcttatcac

SEQ ID NO: 2802 - DNA, 955 bp, Mus musculus
ctggggcggaccctaacactactatagggctgtttggagctccccgcggtggcggccgctttctcgaggtaaaattgaacctctcttgccagagatgctgaagatacagaccttggacaggccaggggtctttgctttgggcttccagcttggatgaccagttggcgatttagagaaacgaacattccttgatgggatgacagagtgacggtgcagtaggcacccttggtaaccggcatcgtgacatgacgggaattgctgacagaggttaaagggcctggaagaagcatggaccatatttggacttgatggtgtctgaaggtgtcagagcatgtggaggctggggagtcaactgtgggcatttggtttcagataagacacttggcatcctgctctggaaacttctccttagagctaagtcacgtgcggaaggactcagactccatcacactcatcagatgagttgtcggtctggggcatgacgttagggattgatttgattttggtttctgtgagaacttcataatcactgatttgtgtgtccacatttgtgtctgcatctttccagtaaaccattctttaaattactcattatcctttcaatagggcttctaagtccagtagattacggtagtcgttgacgaagctctggtttacaagaactaattcaatgtttcattgcatttttgtaagaacatagaataatttataaaatgtttgtagtttataattgccgaaaataattaaaaacactttttttttctctctgtgtgtgcaaaaatatgtgtttgtggccttttttcccccctctttgtttcctttttcttttttgacacctggttactagctagctttataatatggccaaaaaaggatcgatacaagcttatcgataccgcgacctcaagggggccggaccccacgctttgtcccttaagagggtaaatgccgctgc

SEQ ID NO: 2803 - DNA, 824 bp, Mus musculus
ggctcgagggcaagaatataccgaatagcttctgttcaaggtttggttccagagactctaccatttacaggactggctggagttacaacaacctcttaaagagggtagggcgggttctccagttagaccccctaacctcacaggtgagtagtcctaacctgacagccttagaaacacagttgccgagtacctgagagcacccagtggcccgccgcctcctattcagcccctctttaaagacgacagacggttaagccatggagaagctgttcaggtagcacggggccatttctgcccccagcttgtcatgttttttctctcaggacccactctctgaccagtagacttgaatttagccccaagtgatttactaaactcagctcagaagctcacttaaaaataggacctccacatggtcgtgctaagtaaaaatgaagaccccaagttgcacagggtgctgctatctcaaagacaatactttcctttgaatagaaagctgtgccgtccaccctgcaatgggtgctagccaacttgcttgagaaagtcaggagcaagcattttgagttttaaagaatgtcctgaacttgtcttttaagtaaacatagctgctttattaaaagctgtgactactaaagccagtcacagccatcgtcactgtgggagttaaatcatgtcaactttcaaacatcacagttgtttcaatcttctgtccaaagaactcctcttctggagaacacctgatttgggtttggctcttggcttgtcttggtttggtttcctgagatggggcctctctgtgaagccctggctatctggacctcagt

SEQ ID NO: 2804 - DNA, 622 bp, Mus musculus
tggctcgagggaggaaaggaggctggacttggtcccatgtagagggaaactaacactttcacaacacaccttcagtctttggggttactcttttatctttttttataattaggatattctagagcaataaaagagactaaggttacctgtttattatatacattaactggtatgagttttctaaaaaaaaataataaagcacaatgtcattggaaaatgtttgtttaaaaaaagaattcataatttacaacttgggaaggccaaagacatggaagggaaaggtaaagacattttgatttatgacatccacattttgatttatgacaacccatagtgggttgtgtgtacagtaatactacgcagggttttaagcttggagacatttcacatggcttttatttagtttcacattcaaaagttttaacataaattggactttttcactgtacttaaagattgttaataagtatttcagtatcttcatagctagaatttatttaaacatatcctcagatctgggatgataacagataataaaactgacagcattggctttgaatagtaatgtccatagttttaagcaagactgctaagttgtgttgtgttgactgtaagtccgtaa

SEQ ID NO: 2805 - DNA, 795 bp, Mus musculus
ggtggcggcctttgctcgaggcgctcgagatagccattgtgggggtctagaaaacagtcagacattgccctagtgacctcttacccagtctgcctggagccccttgagagctattaaccaggaaaaggctagaacccataagcacgtcaccagttcctaagtccagtgttgcttcaggggctggcccaagtagctggagttctgaaaattattaacacatcagtggaagaaatagaaagactctttagctgttgtcagtggaaagttgaggttgttgggggcaaggggaattgaatatggtcactgccttagtacactggagggacaggaccaaaagtcaagggtcccaggctccctttaatacaaggtgaacagtagaccattagtagagtgtccctgtgtttgaatggcagaactgcccccctaaaacaagaagcattgatctggagacctgagaacctggaaactagtcagtaggtgaatctgagcttcgggaaaactttaccattgtttcccattcatcaaagtcatgtggtggacaggtgacctttgcttgtcctcggtattcagtgccaccagtgctgctgcagctgcaggtaaacccgagtggatggatgcctgctcaccaagtcccagctttccctgactgcagctgggtgagtgcaggtgtgtaggtgtgggccttcagtgatgtgctgctatctgctgtcatccgagccagtctacttggccagtatagagtgtcttttctctttcctcttccaatctcttggccttgaagaaaggactactggc

SEQ ID NO: 2806 - DNA, 816 bp, Mus musculus
  misc_feature (89)..(89): n is a, c, g, or t
  misc_feature (769)..(769): n is a, c, g, or t
ggctcgaggcggctcgagcgggcattttccaccagctccccaaccctcttggtacatgaccattccaggaaattctgaggatagacagnagaattcttccttcatggtacagtcttgattttttttttttttttttttttgtcctttcgagagaaagtacggtatgtgtttacaaaatcttttctgggattgtagatttcagtactgctggctagcagctttatcctccagcacacaggtccgttctggaaagttcttccctccactgtctttatcagttaagttacctcctagaagcacaagtgtaaaagcaccggcgtatggcgagcggagcctttgagacgtaggttcttgacattgatgcataaagtgtacctgggattcctgtagacccatcagttcacctcaaacccagctcttcccacaagcgctttgcagtccgagtcagtccccggtccctgcaggggttaagaaccaagagaacaaacactagaggatctgaatgtagggtgtattgtgtcacttttgaagcacatagtgataggtaagagaaccagatgttgagcccctagggacgtagccccttgactgtgggctgggcgtggcttctacaggttcagtcagtagccaccctcagcagttgagagcaacagtaccttcagtggcttcatttcctgtcttgttgacagagaccctcgggtaccactgtgctgctaatagggccagggctctgctccccgacgaccttgcctttgtacagaaccaagtncacgcacccagcaccgcaccagcacctctgggctctaaactgcttct

SEQ ID NO: 2807 - DNA, 615 bp, Mus musculus
gggcggccttgctcgagcgaaaaacacacccattatttaaaattattaaccactcattcattgacctacctgccccatccaacatttcatcatgatgaaactttgggtcccttctaggagtctgcctaatagtccaaatcattacaggtcttttcttagccatacactacacatcagatacaataacagccttttcatcagtaacacacatttgtcgagacgtaaattacgggtgactaatccgatatatacacgcaaacggagcctcaatattttttatttgcttattccttcatgtcggacgaggcttatattatggatcatatacatttatagaaacctgaaacattggagtacttctactgttcgcagtcatagccacagcatttataggctacgtccttccatgaggacaaatatcattctgaggtgccacagttattacaaacctcctatcagccatcccatatattggaacaaccctagtcgaatgaatttgagggggcttctcagtagacaaagccaccttgacccgattcttcgctttccacttcatcttaccatttattatcgcggccctagcaatcgttcacctcctcttcctccacgaaacag

SEQ ID NO: 2808 - DNA, 807 bp, Mus musculus
ggtggcggccgtctggtctcgaggtttctctgtgtagccccagctgtcctggaacttgctctgtagaccaggcttgtcttgaactcaagatatccccccacctccagcgcctctgcttccagagtgttggggtaaaagatgtgtggcaacaccatccagctcaggacctgatctctatacctggaagcctgtcacttggattctgctggcttctgatggagaccttttatttttaatcttcatggaaaatgcatttcctgctggatgctcatgttacctcgctcatttgtaatttgatgctctctctctctctctctctctctctctctctctctctcacacacacacacacacacacacacacacacacacacacactctgtcaatgactaatgagattgttgcactgggcagaaattccttgcatacagggatgtgtgtgaataacttaatttaaattgaactttcagggcctagctgtgataaaataatactgctcctgttgtggagcgatattaaaatgtttttgcatgccaagtgcggtggtgcacgattgtcatcctagtattcgtgatgctcaggtgggagcaatcaggagttccagacagcctgtgctgtgtcgtgaatcctgccaccaacacaggacttcttgagacgtacacactggtggtttgttgtgctttgtggagagtccacaccgagtcactgactctccaggacttgcctgcctccaccgctcgcctccactggcttgccctcatcattataggaggtctggttaccttctctctatcaagttggaatgcg

SEQ ID NO: 2809 - DNA, 816 bp, Mus musculus
ggtctcgagattgcataatatttgtgggcacagtataaaacaacacaattagtttgtataaccttggatagggacaaaaatacacaagaccttctctttgtctatgggaaattctgcagatcctcgtgttacacactagaaaagaaacccaacctccttctcctagtgatctgcacaattgtgtgtcaccgagaatctggtcacacagtggaagagaacttacctaaacctcaattcctttcttcctctgttgtcatgagtgaagttaaaaaaaaaattccccccaaaagtagcaagttgtgtagtattgcttacagttcctgctccgaagcgcagtctttggctcatggatgccgtaacaaaatcatggctgcaggcggtctgcaaagcaggaggcaaaagccaccagagaaacagacagaggtctgggcatgtggctgggagggggaagacacacatatccacatctcgggacatttctaaatgaggattaatccagctggtgagtcaggggccagcatatcccatgcatgaaaaaatctgaaaagttgttaaaaagccagagtttgcagttttcttatttttctaaaaaagtgagccgtgtgtgtaaacatcgtaaagtaaacaatttaaagtaattttcgaggcttcaatctgaatgtagcttaggttctttcagcgggagatttttgtgattaggaaaaatacccaacctttctataaagctttctcttttaagaagggcaatttcatgtgccaaaggcgctggctcggcctctccctcccccagagcagagttgcaagcggggggcccta

SEQ ID NO: 2810 - DNA, 790 bp, Mus musculus
ggctcgaggcggctcgagggagtctttaacattgatgctgagttactctagctttcaaacacaacattccttggtgaggccactaagtctggccatgtttcaccattctcagtcacactgcttcatcagcaggtccctgtcacagtagcagtattctcgctcatgtagaataattctcttctccccttttctactttgttttgccagtctcagagtatcttggccctgggttgaatttaacttcctctcatcagcccatagtttcggatcaaagttgttggtgttagagattagtaacagctcttcctgcagaaatgcagcccattctggtttgtcctcacccttccctttggatgccccggcagctgtcactcggctcagaaaagtggcaagtcctagagaaagttatttggaactgaatcctcctctagcagtcctgattcatacttcccagtgctgacaacccagtcctcctgatacttttaggcatattctagaaaaaacctgttcgtgtagaaaatttatgatctgccagttttggtgcccaccctgattccaccttctagtatgttggcatggaactttagaaaaatctgacaatacagaataaagacatctgattgggcagaatccacttaggctttaattcttgagtagtctctttttgatgtagattgtttctggaccagttgtgctaagtcctggctcttatggctcaaatgaaatgttatcttcacttgtatattatgtataaattagaaaatgaaacgtgtgaatacaatgtcgagaa

SEQ ID NO: 2811 - DNA, 798 bp, Mus musculus
ggctcgagctcaggtgtgacaccactcccaagcctactcagagcctaccacagaggccctagggacccaccctggtcattctgcatgcatggtttgaaactctgaactatctccacagctcaaagaatgttctttcagataaaaatcaaagttaaagggacataagagtcattgattttacaggagcactttaagtctccaaatagatgatgtaaataatagaagccaagatataaatgctcagtgtatatatttatatttaaataggcttatataagtggaaatattcttcttgaaaatgatgactctaaaatgaatctacctgcaaagggcactttgaataatctcattttgaaagaaaaaatgtatacattaaaaatcccacacagacatactatccataactggtgcaccatcataatgatagaaggcatttatgttcagaagatgggagcttacagcatctaaaaacacttaacactattttcctgacagtttttctagaagtatcaagcaacctatttagccttcaaaaaacaaattccaggtgaatattttcctttccaacaaacttccttctataaagaatgacattcaggtaactgggaaccagatcttcagcaccctggtcacttaagctaccactctgtcccgggaaagcaatgttcgtactcaactgtggattctactacttcagtatcagcctctttctgaacactgtctgcaggcagtccccagcatcctggtatggcacattcatgtcatttggaaaaacactagctacctactggcactaca

SEQ ID NO: 2812 - DNA, 782 bp, Mus musculus
ggctcgagtgaaacacagatgtagcacagcaggaaggtacaaggaaacgaaccccaaggtgctctcacttctccctcatttccaggtctcacggtccatacatacgtagtttagagataggagcaaatgactgtcagccgagatacccgtctccacatgcactaaagattcgtagctgatagaaccacgcggtttgcacccctgatggaggttttgcaaagccctgtggtgtgtgtttcgagtttgaggtgtggattgctaggacatggtgctcattctctagagagtgtcacataaacttctgagggcactgtgtaaaccttgagttcttgtcacaagccacaccattgttcaacagttttccttgtgttcactcaacataatctgacgcccagtgccccacgagccagccacaggacaattcatagttgaggtctcactcattcaactaccatagtcatgagtaaataccagtggataaagagttcccaagggtcagatggtctctcttgagttttctgtctctgcatttgccagtctccaagtggctctatagtttaactaagaagctgggttggtagtagtggccttagcattttggaatgctcagtctctgacgtctacatgctgaaggaatcgtgatctaacatctgaaacccaacagtaaggaggccatgagtccattgagagtctatttgggttgattttttttttttcctggccacagtagaaaagaccatgaatgcaggaacctgcattgggggacgccatctctggtatct

SEQ ID NO: 2813 - DNA, 589 bp, Mus musculus
ggctcgaggcggctcgaggttacttgcctgcacacccaaccgttgtttaggccctgcaagcaagacagcagttgtcagtaagcgctcagactgaacgtggacagtatagctgccccaaacttaatcctccgctgcaagcactcatgttgctgttctgggggttcctaggcctctcttctaatgctttagatgttctctggaaaacaagtattcatatttgaagcacaaatccaagtgctggggtgggggaagaggcgctgtataatcctggctcgccttgggcttgcagtgaatttttttcccctacctctatctacctactaggatttccttgcttgtgccattatgcacaactgggcttactgcatttaacctgaaattcaataggacaggttaaagagtattttgagttaagaatgaacaaaggctgcatggttgcctgagctcaaagacgttggatcccagattctgatgacttattttgtaaaacaaagatatggttgggttggttacaaggccctaagaaccatggaggtggaaatattaacttaatcggtgctctataaatacactggaaaatgtaaaaaaa

SEQ ID NO: 2814 - DNA, 740 bp, Mus musculus
ctccccgcggggcggccgtggctcgagtcggaatccggccagctcgtaggtgtggatctgagcacaggtgagccgatggtggctgcagagatgggtgtgtgggataactactgtgtgaagaagcagctgctacactcctgtactgtgatcgccaccaacattctcctggtcgacgagatcatgcgagctgggatgtcctctctgaagggttgaggcctgcctgtgatactacaggatgttggggggaatggttatttttgtccaagcttcaagtgatttggaaaaaaattttctcttcctgattggagaaaagaaacgggacatttgacacctattcaaattatactgtaaaattttattttatttttgccttgagtatctgaagacactcaaagcagctctttttcaacccactgaacaagatgttttagctacaccgatacaaaaattacataagataagcatgttgtctacccttgttccgtaagtgttctttgaaagtttgtaatggttttctcctaaataaggcatggtgacacatgcctgtaagcctagccctttggaaatagtccggaatttctatgccaactcaggctacaggagaccccaggtcgaaagaataatttgttgtggatgtatttgaaattatccagccaactccctgttaaacatgtaagatccttgccagtgtaaaacacatctgggtaattatgggtttcataatgctaataaatactaaa

SEQ ID NO: 2815 - DNA, 814 bp, Mus musculus
ggctcgaggtttctatgtgtgcttgtctgtgtgtctgtctgtctctgtgtttctctgtctctttctgtgtctatctttctgtgtctctgtgtgtctgtctctctctttctctctgagtgagtgtttctctctatatatgtttctatgtatgcatgtctctgtcccttctaggagtctgcctaatagtccaaatcattacaggtcttttcttagccatacactacacatcagatacaataacagccttttcatcagtaacacacatttgtcgagacgtaaattacgggtgattaatccgatatatacacgcaaacggagcctcaatattttttatttgcttattccttcatgtcggacgaggcttatattatggatcatatacatttatagaaacctgaaacattggagtacttctactgttcgcagtcatagccacagcatttataggctacgtccttccatgaggacaaatatcattctgaggtgccacagttattacaaacctcctatcagccatcccatatattggaacaaccctagtcgaatgaatttgagggggcttctcagtagacaaagccaccttgacccgattcttcgctttccacttcatcttaccatttattatcgcggccctagcaatcgttcacctcctcttcctccacgaaacaggatcaaaacaacccaacaggattaaacttcagatgcagataaaatttcatttcacccctactatacaatcaaaagatatccttagatcctaatcatattcttaattctaaaaccctagattaattttcccagacatacctaggag

SEQ ID NO: 2816 - DNA, 759 bp, Mus musculus
ggctcgagatggaatgaaaatactcctccaaaggacactgagttggaggttgttcaaatatcgcattaaccactaatgttaattcatcccaaatgcagagcatttcccaaatgctgatgctggtgtttctgttttaagtcacttcaaaggtaatcaaaaggatttcagtgggagctgactctcagaggtaaaaataaatatgttacaaaaactctttggtctatcaggtatcatacgattcctagtggagagatttgaaccaagtagacctcagagttaataaaacatgttccatttctttgattcatatttaaaggcataaatttatatgcacaggaccaggaggtccatttccccaagtgtgaatcataataggataccgagttcatttttactttctagaataaagctgtcatagtctctacttattattggggagagaaagagttatttctccagagaaagaggaaaccatggcttttgatggactatctcattcattactcagtgcctgtgtctgaacgtgttcaatatggtgtagcatagaagacagcaaggaagtgctctcaattggccaaaatcggagccttcttccctgggcattgctgaaaccaaggggctgtgagctaagcatggcagaaggccagtccctcagcctgtgtcttttgagccattttgttcatggataatttaaatatgaccacaaaacaataaaaaacgtaccatgaatctggtaggaagagtcaaagctgccaccag

SEQ ID NO: 2817 - DNA, 646 bp, Mus musculus
ctactataggggtttttggctccaccgcggggcggccgtggctcgagaccggatgcctaaaggaaagatccaaaaagataaaaggaactcggtaaacaggcggggttcttgtttgccaaaaacatcacctctagcattacaagtattaagaggcactgcctgcccagtgactaaagtttaacggccgcggtatcctgaccgtgcaaaggtagcataatcacttgttccttaattagggactagcatgaacggctaaacgagggtccaactgtctcttatctttaatcagtgaaattgacctttcagtgaagaggctgaaatataataataagacgagaagaccctatggagcttaaattatataacttatctatttaatttattaaacctaatggcccaaaaactatagtataagtttgaaatttcggttggggtgacctcggagaataaaaaatcctccgaatgattataacctagacttacaagtcaaagtaaaatcaacatatcttattgacccagatatattttgatcaacggaccaagttaccctagggataacagcgcaatcctatttaagagttcatatcgacaattagggtttacgacctcgatgttggatcaggacatcccaatggtgtagaagcta

SEQ ID NO: 2818 - DNA, 489 bp, Mus musculus
ggctcgagaaaacctgatggtggctcctcagataccatcagctagatgcttctagccgtgcccggcaggcgggcaggtatcagattcatcaaagcagtgttcatccgctaacattgtgccgtcctcccggatgtagatcagcaccggaatttacctgctcatccctccgtagagcaagcagtcaggtctgaccagccagttttgagtgccttgggtggcacatggcattgttttgtatctgttggcttgcatatttgtgcttttgaggcagggtctccttgggtaccccagagtggtcttgaatttgagatcctcctggctcaacttcccaactgcagagattaccacttgttttgtctttttgttttgtttttgttttttaaataacagcactagtcatgtgatagcgcttcagtgggctgcgactgtgacttttatgacgtcatgctatgttaatcttgcatgcaatattgccagtatggtgttaga

SEQ ID NO: 2819 - DNA, 878 bp, Mus musculus
ggctcgagaccacatgctgacggacacagggaaccgaaaggcagctgacaagctcatccagaacctggatgccaaccacgacgggcgcatctgctttgacgaatactggaccatgattggtggaatcaccagccccatggccaacctcatccgccaacaggagtgccagcaggagagccagcaggagtgccagcaggagagccagcaggagagccagcaggagagccagcagggcagcagctagaggcccctcgtgggccccttttcatgtcctgacccatgtcctgccagtgttctttccatgctttaagttgactctttcttcctcccttctccctccagacctgttcctacccttgctgaacagcacaagatgggtgggtcgggggctatcaaggccactgtggtagtgcttccctgagcattcaatccctggatcctgtaggccctgggagggggtcccctttgtgaaatatcaatgctgtttggggccctccccccaagacttctctcacttgttgagtctgtgtgctctcgcaatgttcctgtctaattcttgactgattctgggtctgtcctgacctctagaggtgagcttggcctgcttgaggtctcccagctcctgactgtggcagctgtggtagtggcagtaccagaattagccgcttcttttctcccaacctcttagccgggtagagaggcattcccaggggcttcctgtaccagctgactctgtctgagaatgactaacctgggttgagcctctctctgtctgcaccgaaaagacgtgaattggagttggaaaaaagactcgatataaagctatcgatccgtcactcgaggggccgaccagcttgtccttatgagggtattgcctg

SEQ ID NO: 2820 - DNA, 752 bp, Mus musculus
atcgactactatagggctgttttggagctccccgcggggcggccgcggctcgaggccaaaagagggacagctcttctggaacggaaaaaacctttaatagtgaataattaacaaaacagcttttaaccattgtaggcctaaaagcagccaccaataaagaaagcgttcaagctcaacataaaatttcaattaattccataatttacaccaacttcctaaacttaaaattgggttaatctataactttatagatgcaacactgttagtatgagtaacaagaattccaattctccaggcatacgcgtataacaactcggataaccattgttagttaatcagactataggcaataatcacactataaataatccacctataacttctctgttaacccaacaccggaatgcctaaaggaaagatccaaaaagataaaaggaactcggcaaacaagaaccccgcctgtttaccaaaaacatcacctctagcattacaagtattagaggcactgcctgcccagtgactaaagtttaacggccgcggtatcctgaccgtgcaaaggtagcataatcacttgttccttaattagggactagcatgaacggctaaacgagggtccaactgtctcttatctttaatcagtgaaattgacctttcagtgaagaggctgaaatataataataagacgagaagaccctatggagcttaaatatataacttatctattaattattaaacctaatggcccaaaaaaa

SEQ ID NO: 2821 - DNA, 825 bp, Mus musculus
ggctcgagggcaagaatataccgaatagcttctgttcaaggtttggttccagagactctaccatttacaggactggctggagttacaacaacctcttaaagagggtagggcgggttctccagttagaccccctaacctcacaggtgagtagtcctaacctgacagccttagaaacacagttgccgagatacctgagagcacccagtggcccgccgcctcctattcagacccctctttaaagacgacagacggttaagccatggagaagctgttcaggtagcacggggccatttctgcccccagcttgtcatgttttttctctcaggacccactctctgaccagtagacttgaatttagccccaagtgatttactaaactcagctcagaagctcacttaaaaataggacctccacatggtcgtgctaagtaaaaatgaagaccccaagttgcacagggtgctgctatctcaaagacaatactttcctttgaatagaaagctgtgccgtccaccctgcaatgggtgctagccaacttgcttgagaaagtcaggagcaagcattttgagttttaaagaatgtcctgaacttgtcttttaagtaaacatagctgctttattaaaagctgtgactactaaagccagtcacagccatcgtcactgtgggagttaaatcatgtcaactttcaaacatcacagttgtttcaatcttctgtccaaagaactcctcttcctggagaaaacctgattttggttttggctttttggcttgtcttggtttgtttttccctgagatgggggctctctgagaagccctgcctatcctgga

SEQ ID NO: 2822 - DNA, 839 bp, Mus musculus
ggctcgaggtaaaggggggcaaattgaagaaacactacagaattaagaactatttatcaatctaaaacatcaactgtttaattagattttcttttcattgtgaacattcatacattcatttgttattatttgccaatcagatttgtcattgtgattaaaattttggggactggatgataaaccatcaacctaccattttacagccagacatgatggcattatgtcaaaaatcttaccttaagctaaggaaaggtgtgaatttgaggctagcctaagctacatagttagaccctgttgcgggaaatattaaaaatgaacggcattttctgagctacaccgggcaccattgggccacatggctccagctgggtgttctcatctcagcagactctctggcccagagctcctgagatgtctccacccaacttgctcatttcccttgacaggcattgccaggccagccccatgcaacgaccgtccaccctgcaacctagtagaaacaaaactctgtctcaaaaaaacaaaaacaaaaaaaaaacaaaaacaaaaagaattgttacatattagtggctgaagtaggtagaatgatagtttgaacatggacaatgaaaaggcaaatggaatggtagaacctaaaagactgccagaaattgcagaaaggctttgtctagtttcacagagtctcattatgcagaggcaggcggacttctgagtttgaggccagcatgatctacagagtgagtccaggatagccaggctacacagagaaacccggtctcaaaaagattcgatatcagctatcgatccgcgacctgagggggcccgaccacttgtcctag

SEQ ID NO: 2823 - DNA, 568 bp, Mus musculus
gagctccccgcggggcggccgcggctcgaggcggctcgaggtccaggagtagagaacgggatctgactaaaagtaaacacagttacaacagtagaacaagggagcggagcagaagtagggacaggagcagaagagtgcggtccagaagccacgacagagatcgcagcagaagcaaggagtaccatagatacagagaacaggagtataggagaagaggaaggtcacgaagccgggatcgaagaacgccaggacgatcgagaagtaaagataggaggagaagaaggagggattcccggagctcagagagagaagaaagtcaaagtagaaacaaagataaatatagaagccaagaaagtaagagttcacacagaaaagaaaattctgagggtgagaaaagaacgtactctaaaagtcgtgatcataatagctcaagtaataacagggaaaaaaaggctgatagagagcaaagtccagtgtcaaaaacaaagcaaagcagtcaggacaatgaagtgaagtcctccacattaaaaaatcaagaggacgaaaagaccagatccccgtaaaaaaa

SEQ ID NO: 2824 - DNA, 795 bp, Mus musculus
ggctcgagagaatctcctttttttttttttttttggtctcagaataactttgggaatttgaatttccatcagtgcaaatgtgtttctctgctctgctccgaggctaattggtaccatgttacccccttgccttgttactctgctgcatcccttctcatcctgcccccacccccacctccacctcaagaaaggagccagcgaactgactctagtgctagcagttgtgctactgaccgggcaggtgagcttgattaaggtgtggccagaggccaagggagtctcccttgctaaccttgcccagcatccctgggcctgtggacagcaacagtgaccttcgtcaccagctacctctgctcacgtggcagagaaaaggccataagaaccaatgcagacaaggagcacggactcaagacttcaaggaagaagccatttccccaggtccttccttctgcatctcgccacccctggtacaaacaactccattgaatggcatctactcagaaactacaggattttgaaaatggtggaagggctcatgtggtagcaactatgaaccagaaataggaccctcagttacagacattatcttttttagttttgcagaaaatgcatccctgatctcattcatttccagcttgaaagccccgccatgttactctagttcctaccaaaccgctctaggaggtcatttcaattttgtttgtgataataaacggtgcagacttcagggaagtttcacctttaatttcaagcatttccagatgaaagtttcctgacgcggcgcttttgcgcata

SEQ ID NO: 2825 - DNA, 764 bp, Mus musculus
ggctcgagcccaactttgtccggggaatcctgggattatctcttcgcccccctcgtccttcccacttcagttttaagttttgttgagggaaagctaagggagagacagatgccgagatccacatcgtgcaggagtgtgtcctttattattgttgggtcttggggccaaattgacatacacacacccacgactgctcctctacacacacacacacacacacacacacacacacacacacacacacacacacacacacacacgaagaaaacaagacaggctttgcgtcctaagaagtcaacccagggctggtttggaatcctctagaagagcgctaactgcaaactccctccccccagggcttagggtgaaaagatttcttccacctcttgctacgtgtgatgatctgagctcccattgagccaaacagccattcttagaatgtactagaaacccacacattggcaactaacgctgcaactctcaagtgtgtcctttagaccagtgcattatatgtttctctgctgtctggagagcatggagacttaatggtggtgttcaagtccctttcgttgtacagttgttataggggaggtctaggctgtttttctttacctgttactctcatttctgcgggtcattaatgaggattctggttgcactgacattcttcaatatatattccacactgaaagcggactttttaaaaatcctcacctgtatttgctggtctctgttggctggatgctttttgtcgtttgctttga

SEQ ID NO: 2826 - DNA, 786 bp, Mus musculus
  misc_feature (704)..(704): n is a, c, g, or t
ggtggcggccgttgtatggccgacatctgcgttgatagttggctcccgacttaaacgcgctgactgacacggcaaccatagtgatgcaggggatgagaacaaggattgcctgttggttcctgacggcttttaccatactgacacagcttacgatggcatccaaagttgaaaagactcatgctttaccaccgtgctgtagcacagaatccctcatttccagcatcggtctggggatcttctgcctagtagccgacagacttcttcggtttcccataattcagcacaatgactggcttcgcgccatctcagataacatagtacacggagtgatcggcatgtggtcgtgggcagtagtcactggaatcaggaagaagtcggactttggagaagttcttttagcgggatttttagcgtctgttatcgatgtcgaccatttttttcaagctagatccctatctttacaggccgctttgactcttccgcgaagacctttccttcactgctccactgtgatacccatcgcggtcctgagtgtgaagctcgccgtgcacttgttcaagctcagggactcgtggcgttttctcccgtggatgatactcgtttcctggacctcacaccacatccgcgatggaatccgtcacggcctgtggatatgcccgtttggaaaaaactcctcctttgccctgctcgtttatgtaataagncacattcgccctgccacacctgtgctcattcctgagtatttaacagggaccagacaaacggggtcttccaaatacgggatgc

SEQ ID NO: 2827 - DNA, 644 bp, Mus musculus
ggctcggcagcagtagggggaatccataaaggcttgtaattctttttgttgttatgcataatgatatctatgcaaatcttttacttattctttgataatgtcatacatgtatgtattgatcatgtccactccccctcccccctttgtagattgttaaccacactctctccttttgaactatttccttaggaaaaatttcacaggagcagaatttcttgataaatagtgtgatgtttgggtttatcttaaaatatgtttaattttttaatgccagaagattgtaaagtaaaacataaccattgtgggatgccatctcaaaaggcttcaagacatctgcctgaaaactaacccttctcatgcggccaaaaatataccgtggtagccaagaaaattaataacaatccataaagccatctgctctctcctgactccaggcccacccctgccctgttgtccctcactaaattctacacaagagctgcacattgtacctaatgggtgtgtgtacctcttaaaataatgaaacatttcaaaaaattaaggtctcgaacagtcatttctcatgagtgagacttcctaaggaattgttggctgctctctaggtcttctagaataagccattcagcactgggttcttgacatgg

SEQ ID NO: 2828 - DNA, 786 bp, Mus musculus
  misc_feature (741)..(741): n is a, c, g, or t
ggctcgagttcaatatcaaacctaattaaacacatcaacttcccactgtacaccaccacatcaatcaaattctccttcattattagcctcttacccctattaatatttttccacaataatatagaatatataattacaacctggcactgagtcaccataaattcaatagaacttaaaataagcttcaaaactgactttttctctatcctgtttacatctgtagccctttttgtcacatgatcaattatacaattctcttcatgatatatacactcagacccaaacatcaatcgattcattaaatatcttacactattcctgattaccatgcttatcctcacctcagccaacaacatatttcaacttttcattggctgagaaggggtgggaattatatctttcctactaattggatgatggtacggacgaacagacgcaaatactgcagccctacaagcaatcctctataaccgcatcggagacatcggattcattttagctatagtttgattttccctaaacataaactcatgagaacttcaacagattatattctccaacaacaacgacaatctaattccacttataggcctattaatcgcagctacaggaaaatcagcacaatttggcctccacccatgactaccatcagcaatagaaggccctacaccagtttcagcactactacactcaagtacaatagtagttgcaggaattttcctactggtccgattccacccnctacgactaataataactgtatttaacaactatactttgcctcgg

SEQ ID NO: 2829 - DNA, 835 bp, Mus musculus
ggctcgagcaggccccaaggcttgaactccagagcagggggctggtccacaccctgggcaggtctgtgtgtcaagccatgctggaactctgcaaactgaaagggcctagaaaaacacttgtgcttaacctggggagtttttacagtctctgagggatggggtctccagcagcctcccagagtcttggccagatctgtagaaaacgggaataaaccgactgtcccccctcagtggtttttactagtcctgtgggcagcctggatgtgctagctacaccttccccacatgttgttaggcctggtttgtgagatagaagatggagtacctgaccacctttggcctctatcaggggtgggaatatgactctcactggtgacaagggcctaggtggcaaatgaagtggtttgagcagtaactctgggtgcaggacattgagcatatcctgctaccacatgcttcaccccccattgtcaccccacatcctgggcatgggagtggcccctttaaccctaccctgccaagaaaaccaaacagggaaaacaaagatgtaggactattgacctagctctttaacttgtagccagctgtcgtcgttggtctggcaagagggctcatggaggaagtctgtctgcctcccaggatagcagatgaggtgccttcccagtggaccctgctgctgctcgcttgctgcagagaatggttgcactaaaccccactcttccccaaagcaacattggtctcttgtaaatagctcaagtatctcaaagaggcccgaagccccattttgctggggatggggggggggcaaggcttggggcggagggaatgatgggac

SEQ ID NO: 2830 - DNA, 685 bp, Mus musculus
ggctcgagccccaaagcacccttcacccctttaagtgtgtattttaaccaaatgaagttgacaagaaaggcatatgttggggctgcaggattcctagtgtagtagaagcattgtatagatagagatgttgatatatatgtttgtgtatatatatatcaagccaaatttctgatagaaaagtatagctttatggatgaggaaggaaaaggagccctctagaggttggagccagcctcgatgtgtccaatgagcaagacacgccgtgcttcacgcgcagctaaggccccaggacccggccctggcctcacctctgcaaagctggggggccccgaaggctctgctgctctctgtgggtccccagcaatgaaggcataggagagtgaggagacagagatcataaggactggaatttttcatccctttttgctctggccacctgttttgagctacagcctgattatatcacatttccaaaaagtagtaccatgaagatggcgagccgagatctgtcacaatgcttagctttcgactgcctgtggcttcaggatgctcaggacagaaagacacactccccaaaagcccccccccccccccggagacctggcagtacccatccccaaggccaaggaatgaggctccctcccccaggtcatctcacctagatctttctcccccccaaaaaaaa

SEQ ID NO: 2831 - DNA, 776 bp, Mus musculus
ggctcgaggtgcaatcttgcgagagctggcttgcgcacaggcagtcggctcccaacctctcctatcagggatttggaggtgggaaagctagctgggttaagcaaggatgttgttccagcatcagaggagctatccaaggaagtatccaaggaaccactcatctgtaaattcctggcaagtcttaggatatgacaaagggcacaagatgcattatgagaaaggaaggctgagattttcaagaacacagatttacaccaaacttacgttctgaattaatctttgagaatactggactgtaagctagacattgaataagaagcctgttatgtcaagaatgtgacttaaaaagcattgcatctctcttcctcccacaagaggatatattgaatctgggtcaaagtcagactacaggaaaatatactccccaaatatgccagcaagattttgaaaaaaaatagtgggactatgtgaagatgttcctttcaaagagacgttggttccaaaggaaagaaagtccaattgcctcacaggaattgactattccctggtagtaatgcaaatagaccagatgtggctttctactttaaagagaatgagaatgcttaattttagttacagagtaaaatgcagatgttacaaactttttttttttttttttttgaggaaatacatttgacaagtggagggacaagaaactaaatggaatggtgatgccctttgtggagtgagagcgtaaaacgtgtaattttggaacagaaaggagaattcgttgatta

SEQ ID NO: 2832 - DNA, 687 bp, Mus musculus
ggctcgaggcggctcgaggttacccagctgttgagaccctcagtacctagtgtctagaaacctctaggtgtgctgcttcctctgtggggcagacccctgctcccgcagacagtatggagcactcacttgagagagagcaaaggggatcaaccaggtttggcttttggcttgaacagttgtgtgtgaacaatggaaaaggattggcacccagtctccgtctgctccaattggagcagtaggggtcagccagccactagagccttggggaaaggggctgagaggtgtgcagcttgcttggtagccagcagcttcctgccagcctaccccttggctcgggattgtctttgttgcaaggtctcggcaatttacagaactctcactccttccctcgcctgccatcttctctgcttctgagataagaaccatttgtgtaacaccaatacctaacttaagacagacatgcattgcgtggttgtaatcaaagctgatgctttcagatgatgtaatccatctccaatgcggaaaagacaggcccgtccatccacattgctgggcacccagctgactgtaagaatggaattccaaacacttaacacattcagttctatgacagaaagtgagtctatggatatggattttgtgaatgacttttaaataaaagagaaccttacagaacaaaaaaagaat

SEQ ID NO: 2833 - DNA, 766 bp, Mus musculus
cggctcgagattagtctaagggcaagaaattcaaaagctgcttggcatggtgaggatgctcaggaaacagtccattagccaacctcctaagagacaggagaggcatggaggaaactttaagtgagacggagaatgggttgttaaacaactgtttccagttgccagaggaatctcacacaaattaagagatgaagtttttagagaaaaatactaagtaataaaatttaatacagagactacaactgccatactgaaatgcaaatagaagaccattgtacaggcttgggggactgaggactctcaatgttgctttaataatttcagaagctagagaaggggtcttgaatcttaaattactacataaaggaaatgtttttccatatttactttgtatagttggtataataacagtgattcgaaaaccacaataaagatgataaagattgtgtgaaaaaggagatatttggtaagtgtggcttgctcctgtctccagagcccaggcagtcgctctttcaggagcgtttgcccctccgtcctgaggcctgagttgaatctgcagcactcaggtcaaactggtcctgaggttgagcccttgttcccagctcaggaaggcagagcgaggcagattgctggtgtgttggttagccagcccagcctaactgatgagctgcaaatcccctgtctagaaaataaggtggggcagatgagctgtttcagtagggaggctcttgctctacaagcctgcacctggattgattcctaaaac

SEQ ID NO: 2834 - DNA, 780 bp, Mus musculus
ggctcgagaagaagtacatgatttcagagagaggtgggttttaaggcgctggccggcattgctattttcacatgcaatatgataggcactgctccatgtggattttttttcattaataaattcccataagataccttcaaggtttataacttattccaaatggtacttcacaaaaacacttactgggccataaagatggctcagtggctaagaacacttattgctcttctggaagactcagaggtggttctcagcacccacatggcagccatctgtaactctagttttagggtgatctaatgccctcttttgaggcactgtattcacctcatgcatatatatgcatgcaggtaaacattcatacacgtataataaaaacctttattgtatgtaggggtgggtagatattatgtgcatcatagcacacatgtagaggtcagaggacaactttcagagtcacttctcactttctatcatgtgagctccaaagattcaaataggttgtcagcttcagtggcaagcgtgtttgctagctaagctgcactgcgcttaagatacctttattattcctgtcctacacatgagggtagaagcacagagacttaagcactcacctgtaaggagaatcatggtttctttaaaaactgagtcatgttatgtaaatatgtctcttgcttatcatcgcaagatgtcgcgatatggggcctgcttaagatagtccacatctgctaactatgatttgcctcatgctctgggcgagaggtgatgttcgccctgctg

SEQ ID NO: 2835 - DNA, 613 bp, Mus musculus
  misc_feature (36)..(36): n is a, c, g, or t
ggctcgaggttttttgtaaccagtctcttgtctcangctctctgccttgttatcagtcttaagcatataaaagaaacatttgtaaagatgtataagagtaagaaaactaatgactaaaaaatgcaattcaaagcaattaagtttcaatttaatattgagttgcttcacttctgtggcttttttttccctggtaacatatatttatttaagcaatgttgtatgccttgtcttcatttctatagagattgtattgtatgtgtttgtgtaagctggaatcatccttaattttctgttgctaatttttcaaatgaatttacatgaataactgtaaaatacactaactcttagggtgttatagctgaaacacggagatgtgtagctgccatgctttttctgaatggacaggagaaacataagctaccaagtattcatttctgagggtgctttgtagggaaagaaaggctggcacttcctcagaaccctctgtcttgttaacgggtatcttttgttggtgtgttttgctcttacattacagatagaatatcgtgtgtgagctgatgaataattactttcagttattctgctttcgtataagccatctgagaccttgcta

SEQ ID NO: 2836 - DNA, 745 bp, Mus musculus
  misc_feature (675)..(675): n is a, c, g, or t
atatattatactattatataaatcaaaacatttatcctactaaaagtattggagaaagaaattcgtacatctaggagctatagaactagtaccgcaagggaaagatgaaagactaattaaaagtaagaacaagcaaagattaaaccttgtaccttttgcataatgaactaactagaaaacttctaactaaaagaattacagctagaaaccccgaaaccaaacgagctacctaaaaacaattttatgaatcaactcgtctatgtggcaaaatagtgagaagatttttaggtagaggtgaaaagcctaacgagcttggtgatagctggttacccaaaaaatgaatttaagttcaattttaaacttgctaaaaaaacaacaaaatcaaaaagtaagtttagattatagccaaaagagggacagctcttctggaacggaaaaaacctttaatagtgaataattaacaaaacagcttttaaccattgtaggcctaaaagcagccaccaataaagaaagcgttcaagctcaacataaaatttcaattaattccataatttacaccaacttcctaaacttaaaattgggttaatctataactttatagatgcaacactgttagtatgagtaacaagaattccaattctccaggcatacgcgtataacaactcggataaccantgttagttaatcagactataggcaataatcacactataaataatccacctataacttctctgttaaccca

SEQ ID NO: 2837 - DNA, 590 bp, Mus musculus
cgagggaaggtgaaacagtcaaaatatgtcttaaatctacctgtattacaatattacttattaatagtaaatcctcatgaatacattatttatataatgaggaaaatcactaagagcagacaagagttgttgccgccttacgagaacagtgtgagtttctgtagtgagtctaaccccgaggagggaatttagtggcaaagtatatattggtagagcaactggttcttgtagggcaacagaaggccaaggtggcatccatccccatttgagagaattctggggagagcctcaaggagaaggaaaggaagttgttctagagtctctgtgtgtggccattgcctatctctgtgtcaccttgttcttactcgtggctagcttgtacatttaatttgatgagtaaggggagatgaccaaaatgtattatgggatctaaaaagacaaatacaattgcttgatgtctagtaatttgtaaaggtttctttggacttggtccttttatttgaaccatgaacctgtggctatgccatctgcagtatacactggcattcattataatttctgatatgtcatggacttcctgtgaggtactg

SEQ ID NO: 2838 - DNA, 592 bp, Mus musculus
tcgcccattagcaaacacctttaggggccttggtatgggggtaaattgatcaaacattcattcctagtacttccatttagtttgcaattccaggccccttctgtgggctcctgttcatgggaaggaagtggtttgctaatactcaatacacatgtcctgagaatgtgaggcagagagggaggggccagacctcaactgctcatctgatcaggccaagctgcgcgttttctgttgcagttaaggtctctgctaagccaggtgaaatctgtaagaactaggctgctgttgatgctatcgtctatacaacagtgcttacccagtgtggtgcagggcacctcatggacgcgggtctcttgtgggcaagagttgcttgaagcccacatttggagcatgtggccaagtgctgtttggttctgtatttcttggcttcttgttgctaaattggagccgtttgattcttttccgatcagctgcattcctccaaggttagagacaccattccgagcaagaaattagaaccccggcttcaggccttatagtgccttgatagtctcaaaggtttctggaatacaaactgacattgtgtctaggt

SEQ ID NO: 2839 - DNA, 755 bp, Mus musculus
gcggggcggcgcggctcgagtggctgtttagtatgtgaactggcattgcgtctgctatcagggggggactaccattgaaacagagcttgccaaaatttcaaacacttgaacattgtgaagaaaatggagttgaatttcaggtcttgcccttgccattaaaaacatcagacaggagacttggtttactgggtacagaggtacttgactgttgagtacctgcggcacctgaccctgtcactgtgccaaccaaagcagctgcagtgtaccagctatgacatgaacatgtttacaaagttgagtttgtcttcataaaagaatgatttttaaaaaactttttacatagttatgactcaatgtgtttaaagcataacaagttagcttaaatatatggtctttacttgaattttaattcttacagatagcaaattttgactgtttacaggaatgcttgaaatgagtcaagagatctctaattctctctgaagcaaaactgatacaggcttagtgttcgagcctgtgtatttgtggcattggataggcagtaactcaaaactacgtttcgcttacatcttgttctataaagtagtacttttgcgtggataagtatttttaactgatattaagaaatcatatttttgcatttcagtcaaactagtaagaacatacgtaaaagtacaaatgagatgtaaatctgaaattcatgtttcatatgatcaagctgtatttttaaattcaaatttaaaatacaatagaga

SEQ ID NO: 2840 - DNA, 759 bp, Mus musculus
ttttaaagagttgaactgatatcaaaatatcatgggaacttcctcacttaatatcccatcctgaagatgtgtcatccaagactaagcagaggtggtaaacgcttagcacgagcactcgatggtgaaggcagaggatctcgggaggacctcagctttagtgtccaaacggtcctgttctcaggtccagccagtcgcagcagccagtaccatcccagtgcctgtacacagatgcagctggctcaaacacctcccagaagtgccttcccatcagtctaccctttgcagagtcagaggctgagactaggttgagacaagtccggttggacatcgtccctgccccgacgtatgacagccctgctgcgttggtgactttgatttggaagtcagtcagacaaacgctgtgtaccttctcctgtgccatgtcacagcacagatgggcctggttagctgtaccagcgccctcctgtcagttcacactggccctctcttgatatttagtacagctacttaatcaggagcactcttagcagctaggcaggtcagagggcagtacagttgattcagtgactcaggggactagggccattcccattaaatgagctgaaattaattctagagacattgagacagctcagttagcaatggcacttaccaaaatcccagatcacctgaattcaatcccctgggatcccatctggtggaaggagagaaccggcttgccaggatgtcttctgattctaccgtaccacgcacagcaaa

SEQ ID NO: 2841 - DNA, 722 bp, Mus musculus
gcggggcggcgcggtcgagacaaaaagtaggaaacacttaaaataatttaccgtcagacatggtgatacagccctgtgctctcggcattttagagggagccacaaaaggatcagatccccaactaacggcatagtaaactcaggccaatatgggctacatgcatacctatctcagaaactgaagcaaagtacattgtaaagtagtttccttattattgtgtgtgtactgctgttgcctccatatgcatgtgtatatcacatatatgtcagatgcctgtggaagccagaagagaacagtggattccgtggacctggagttatggccggtggtgagctgccttgctagggaacaaatccatgtcctctcgcaagacaagtactcttagccactgaccatctctctaaagcccaaaataacttttgttccctcccctcccctcccctcctcatggaggccagaagaggacaacagattccctgaaattgttcttagatgttgttgtgagccagcaagtatagacactggaatctgaactcaggccctctgcaagagcagcaagtgctctctgctcctgcccactgagccatttccccagcctgtgtgactctgcttttaaaacgtttgctaagatatcggagccaaatgtacgaagtaaccatataaacctttctgtccaaaagtaagtgtcttaaataaatgcagcgtgagtgacggggggaaa

SEQ ID NO: 2842 - DNA, 637 bp, Mus musculus
cggcgcggctcgaggttaaagttgcaacaagtaaaattgggattgtagcgtttacttgatgtttcatcttaacttaagctatggtctttaatctctgtggggcggggaatgacattggttataaaatggaccacagtggaccagtgccagcagctgtccaaagctcaccagataaagctgttttttttttttttttaggaggaacacaaaagtgaaaccacatatgcgtgtgagtagctgggtttcctagtaataccagtgaagattctgggaagacctgtgccatgtggtggggttttagtaacatggtttggttcttggtatgttagaaaggtggctgggcttcccccgaaggattgggttttcttagggcattttaataaccagtgaaggtgctgtggggcatcagtgagtcagagtcagattttatttagtaggttaaggttctggtgatgggagtcttgggccctttaaattctaggaacaaatctcgggggggtccggtaaggtatttgggtcaggtcttcagaagagagagacaggaaaaacttacttgaaaacaaaattcttttccctttaccaatgaggcccggaagtgctgtaattagctatctagggccttggtaacaggtgggtg

SEQ ID NO: 2843 - DNA, 267 bp, Mus musculus
tcacgcggggcggcgggctcgaggcggctcgagggcccgtagggaagtcggtcgttcgggcggctctccctcagactccatgaccctcctccccccgctgccgccgttcccgaggcggcggtcgtgtgggggggtggatgtctggagccccctctgggcgcccgtgggggcccgacccgcgccgccggcttgcccgatttccgcgggtcggtcctgtcggtgccggtcgtgggttcccgtgtcgttcccgtgtttttccgctaaaaa

SEQ ID NO: 2844 - DNA, 705 bp, Mus musculus
  misc_feature (221)..(221): n is a, c, g, or t
caccgcggtggcggcgcggctcgaggaacgaagagcttctatgaaaaccctcacctttccatgtcccaaaaaccaacacaagtccctggggcgggtggagaagatggtggagccccgtgagacggggcttctgtgtgacccttacttcctctgcacactgggacccttgagccaagggcagtccctaccaggtgcccaagccgcaagtctcagggggcttntgtctgaggaccttcttggggccagtctctgaggacgctgccaccctagagcacatgcatgcccagccattcttcctgcttctggcctcggagctgcttgtctccagatgccctcctgaaaccatgagaagcttcagccttgcctcactggcttccccatctgaccccaccaggtaccacactgtcacccagcgtccttgatctcctcttgttcccctttctgcttgtagcagcctcacttggcaaatgtaacggctcaggtaccctggcttccttcccagaaacaagccttgcctgtgcatcctggagagttaggtccttcagaaggccagagctgggacaagccttgacccgttctgcagcccttagagccttcacacgtgagcactaggccatcttagcagaaccccatctggcagcacatgccaagtttcaggaggatcggggggaggcgggtgcaggcttgagaagaatctgggtgtgt

SEQ ID NO: 2845 - DNA, 180 bp, Mus musculus
gcgggtcgagcagggtctgaagctagatcccagagcctgtccttaggctgtctcatccctcagatttctccctcccgtcagtgtctgctcttggattccatgtttcacttgatccttccaggaagtgcagagctcagatcatgtttacagcactcactacccccttctaatgcccgcgca

SEQ ID NO: 2846 - DNA, 728 bp, Mus musculus
cgggggcggcgcggctcgaggtagatgaggtgtaacttaagctaaatgtattctatttatgaagcaagagactgtatttttatgaaaggaaaaggtttttaatctagggtaggcagtcatggtggcccagcatttgctgtggataagataccgccatgttcattgactccggtgtacaatcaacagtaaacccctctcctcagcttgccctccgtcctcactgaacgtccgcacacagctggggcgggagtttgtgtttcttcttccccggccctcagctccttagaagtcttggaagggagtggggagggagggtggaatgcagaaaactgaggtgggggagaggtaggttctaattagtcaccccatctcccttctggccagacctgctcccattcagctgtgtggggagagtaggagggaggttctgtggggttgggggacacaggacttcttaggggcatagggacttactatgtctgaagtcgtcaggcagctggagcaggcatagaagggactcaggacactaagagctcagccctgtctgtgtctactccaggccaaggtcgagcttggttgtggatgaaggaccaggactctgtagggtttcatcagacctgggtcctccctctgggactgacctagtgggaggagtggagacgggtctgggcaagccatacacactctgggaaaagatttccaggtcagcgtggactgtgtgtgagtct

SEQ ID NO: 2847 - DNA, 851 bp, Mus musculus
gcggtggcggcgcggctcgagctgtaatatttgaaagttgtgtatataagagaagcaagcagggctgctgacccagtgaaggcggttttgatagtgtagcctgccaggtgctcagtagataaacatacccacacatgtgcacacacgtgtcatgcttccttacctgtgtgcacgcacttactgacatgcattgtctgggcatacagtgtccctgctactttcgagacaatcatttccccaatgcttagtgtttcgtttttacttgggtatttactaggggaaaaaaaatccccaaattgaaataccttaaaaataaatgaagttcagtggcaaagtgtttgcttaggacaggcaaggggcttggctccacccatagcagagcaaaatccaaagggatcaacaggcaaacctagtgcgttcctgaccatgtaagtatgtctcacattttacccaggttgtgcacaatggacactttccaaagataagtcctatcaagacttttgagctgaaaataaacgaatcacttagtagtttcaatgttaagcttcacctgtgaagcccctgttatatactacctggtgggtaccttgccaacttttcctgtgaaaccagatcaacccagagctcccccatcattgttcaagagaaaggagtgggggtggggagaggactccagtctataaagagtgtattaacacattattgagttttcctcttccccccaaatacatcactgtcaacagaaaagacagtctaatggctgctgccctagaggtgcacaatgattgggctgttttcgttgggtaatcttttcagttcccgctgacaccttttatgcattctgactcatg

SEQ ID NO: 2848 - DNA, 758 bp, Mus musculus
acgcggtggcggcgcggctcgagatatcttcaaaatgaaacaaaacctcttccaaacaaaagctatatagagcaggaagtggtggcacaagcctttaatcccagtactcaactaaagcctcaaaaacaaaaattttatgattgtgatagctttttgtcactgacagattacctagaaagtccacaatgaggtttaattttggtttatggtctctgaggtttcaggctacagccatgtggccctatacctgtaggactgtgtaggcagaactttatggtgtgagaccttggtaaaaacaaatcccttgccaccaacaaagagaaaggggaatatatccagggatctccctcctcaagtaggttgccaactcctaattgcttgtccagctgtgacctcatcgtcggattaacccatttatgaggtatttgcctttgtgattaaatcacctctcagtgctactaactaaggacaagctcttcacagggtctgtatgtggcaggcatttcatatccaaactttctgtgacagcataggagacacaagtccaggggacaggtatgtcgggacaaaacttttcctagtgagacactactcacctcagatagggaacctaccacagaccaaagtatggataccatcagagtgcaaacttggtgaaccaatgagttttattagggttacttacaggaatatgggtaaggagcagaaatgatttggatagctgcaccaccaatgtgcaattctatgcatatattagg

SEQ ID NO: 2849 - DNA, 325 bp, Mus musculus
gggtggcggcgcggctcgagctttccggggagtagggaggaggaggcggttcgtcggaggtaagcggtcttgggagctctcttctgacctttgtatagcttactctttccgccctgttccatatttcctaacatccccaggagggaggctggatgtgtggaagctcagaatctgactcactcttgagaagactcgtctcaggacaacagtggttgaaagccagactatgagacggttcccctccactctgaccctccacgatgccttccttgctagacctggttgatgaggaggggccacagacccacatgcacacctattaaga

SEQ ID NO: 2850 - DNA, 827 bp, Mus musculus
acgcggtggcggcgcggctcgagtctaacaaccatgattttctctccccactggcacaggtagaccatgctgactgcctgcaccctgcaacttgagtaggctttatggtacgccaagaaccacctgaagccatcacgtttggtacttagcattctcacaagtgaaaacagattcaggagagcaggctccaaatgtttcaggatccattctgaaattatatctctgttgtgtaacagtttcctcaagattgaaacatcccatctttgggggaagctccttaaaccagaaggttagcaattcaaaatagcttcaggaagtcactgaaactgaccagattcactaggcccctccctaccagattaaacaatgaagtagagagtccctctgagacccactgagctgcagaggaggctgagaccagatcgactgcttggaaaaagcagaaactctctgagctatctggaagaggcttagatcagactcacttggcctaaaagaaagtacattcttcagtgtttgagctgcctgcaggctgcacagtgtgttccaggtccccagatttgtgagctgtcaatcatgctggggtgggctttgttgatgcaactgtctgtgagtcatttctgttcctaatcctataagtaaccccaataaaactcattggttgaccaagttggacttctatggtatctgtactttggtctgtcatgaggtccctatctggggtgaggagatttgtgattcatcttcccaggaaaagctttgtcacacaacggtcaccatgaggggcaggattcaccagtcaagtcttacaagcataagatccaaca

SEQ ID NO: 2851 - DNA, 466 bp, Mus musculus
ccggtggcggcgcggtcgagtgggttcccacgcttctctgagaatcgagtagagacaagttgattgtggtctgcatgctctctcctttgcccgtcctcggaaacctgcctgtctgggacctgagggagcacttagtgagcaagtcccagcttacagtccgactcttacttagaaggtgctcagcatctggggcacagaagctagagctggagcctggggtagggctctaaccagacagcccaggtaaggtcaagccaactctgagctgagccagacagggctgttgggttgggtttccattcctgcctccaatgagatgaagcctctccccttcccattcctagccagcttggcgttgctgggtcctgcagggtatttctgtgtcatcttgggtagtatgtgtgtttgggagcatgtgtgtgtgtgtgtgtgtgtgtgtgtgtgtgtgtgtgttgtgtgtgtgtgt

SEQ ID NO: 2852 - DNA, 866 bp, Mus musculus
  misc_feature (731)..(731): n is a, c, g, or t
gcggtggcggcgcggtcgagaaaaaaattaattaaaaagaaattctccccaggaccaattgtggttcaccctctttcccacatgctttctgctctagtttgtaaaaaaataaataataaataaataaaacaaaaaaaaataaaacagataaaaataaaaacaaaacaaaaggaatgccagtggtttaaaaagtacttctgtattcttcagtatcttgatcttggaaccctttgctggggaaaggaattatctgggactcactgttccctgtggagtgtagcagcccaaacagatggaaagaactgctggccatggaaatagcagtgtgtggccacccagcaaagagatggcactccatggtgacatctggctggtatggctggtcctagctctgcaacactatggagatgggagggtttcaggacactggaatggcttcacagtgatcacatgactctgatgtgcagcccgtgggcacatgtgcctcagatcctaacgaatgctgtgcctacctgtatctaatggcgaacgccgaaggtccattgttttctaatacagaacaaactggtaacaaaaaccacaatgtgtgtcccctcgcccccttttttcaaattaagatccatgtccttgggctccccgtgcattattgggcatgtctctctggttccacaagataccgttgttgaaaacacatggaactttctaacactgcaggacaaaaggtctggganaccattgtgggttcgggttggtctttcagtttcttgtgggtgtcgggcagtgtgcagacacatgtacaggtggagtagggtgcctgcctggtgacaacccctgtctgcttcctatgccagtgaggttgaagtaag

SEQ ID NO: 2853 - DNA, 248 bp, Mus musculus
aggcagagatgcttcccggctaacagtcggcttttccttaggcccaaacaagagccaggtcgcctagaaagcaaaaggcagagccaggttgatttcaagcgtggaattgaatgtctgagacaaaagaaaaagtagaggcaggaactacttatagctcccggccccccaactcttgggagttcttccttgttttttccttagtaaatctttgctcactgtgctaaaaacaaacaaacaaattttaaaaa

SEQ ID NO: 2854 - DNA, 574 bp, Mus musculus
  misc_feature (80)..(80): n is a, c, g, or t
gcggtggcggcgcggctcgagcttgctcagcaaatgtgggctgcgagcctgctgagcgctggccgggaggatctcctcanggtggggcaggcttgggcgctgctctgctcctctaccactggagggaatggaatcatgcgatgggcgagcacctgctgtggagaccagaagtgctcatggctggtcctgagagccttgatgagctaggatcactgttcttaaagaccactgaaactggaagggggacctgtatccccttgggaagagaagcccctggcaagcagtgggtcctggagactgggttcattgtgagcctttcctgccagggaggcatgagtctttgcagggaaactgtctcctccagcttctcctgccttggtctccccatattcttagcctttctatttatttcctggtgtataactttccttgctttaaagggatcttcctttaattccttgggccaatttactggccattgaacagtgtcccttgagtcccaactgtgtctctggggaaccttccttacccagccctgctgacctcccacttcccaccctgcagctgagtatcc

SEQ ID NO: 2855 - DNA, 605 bp, Mus musculus
  misc_feature (45)..(45): n is a, c, g, or t
cgcggggcggcgcggctcgagggacccgggaaagtttcttcaggnttgaaggactgccccttgtattaataaaaaaaacaaagtctttccagctggatgtggtggatctcttaaatttgaggccagccagctctccatagagagtttcaggccagccaggctactagtgaaacttgaatagtcctaaatggggtgagagcttcctagctataactaatttttccctccatacctcatggtttgaagaaaaattttaaagtctactgtgcaaacaaaacaacaaacagaaatacctgctcactattgactggtttgggttttttttgagacttcttactctaccctaggcagagtaattcttctgcctcaaccacgtgttagatttacaggtatgagctagtatatcaacttgtttttttcctttgagacagggttcggatagcccagactgaccttaaactcgttctgtagtttaagctggcattgaacttccttcctccgcctcctaagtccttggattgtaggcaggtaccaccaaacccaatattatttatttacttcctttgtgtttacatatgcatacatgtggaggtcagaatttgtaa

SEQ ID NO: 2856 - DNA, 786 bp, Mus musculus
gagattttgaatcattgaaattatagcttcttgctatgtcaggacattctattaacaacaaaaaaaaaaattacaaaattcagtcttgggcctagagtcatggctcaatggttaagggtttgggaccacctaacaacctgagttaggtccctccatctcattaatggggtaccccttggaaagcccgcacctgcactgacatagagcacatttccacccagtctcctgtgccatggctgtgtggctccagagtagttgtattaagttgaaaacggctgtgggagaactatttcagagtgccttttagcctgggtaatagggttaggtaaaacagggaaacccaaatgctgctgtcctgtctctaatgggttgtgaggtatttgactttagggttggtttctctttgcgtttaaaaactctgtaattttaattggtctgccagaggatgtacttttgaaacttttaagttggttgcaagtttagaatgactatggcctccagtggcagttggtctacatagcaaatgggccacatttaatacccccttactctgctgagacttcctgggatgggaaaaacaagagtggttcttgtgtgcctgccatccattgagcaagggatcgctgaaccagctggttgtgggccacaatatatacctaggagcatggtgtaatctctgctgtattcactggctagagctctgggaaccacacagtgatttctctagtgtgggaaaggatgtgactgggttgcaggcagttctgagacgtggtgctgcagtgaaat

SEQ ID NO: 2857 - DNA, 682 bp, Mus musculus
  misc_feature (147)..(147): n is a, c, g, or t
cgcggctcgaggtgcaaatgcacctcagctatcctacatgatgagagaagagcctggtcaccaccgtcattatctgtgcccatcttatcaactttaagcagacttggaagaacatctaggccacgaccaacaaaagaactgcctagnctgagccgagcccaaactggagattcccgcttgagaggagacattcagcattcctgtgttcatttatcattgacgataaacctcccgtcagaatatttgtctctggtcggttactcacccaaccttgggtgtcacacaaccttcactttgttagcagacttttcaatctgcattattgtggtgagacacgtgactggatgaagtgactggagcaaggggatgcttgctatcccctaatccagtggtggtctacttctacttattgatctacatgtagtctctgattcactggtcagtatttccatggccacgtgactggaattccagagtccattctgttagcatccattatacttcatgagatttccagaaaaggtcctctgtgagtggtgtaagagctgctgggttagggtgggtgtggggggtggaatcattacttggaggagaactggcctgccaaaggacttcacggttgctttggcctgccctagatggatcaggaggatacttcagcccaatgctggcacttccaagg

SEQ ID NO: 2858 - DNA, 728 bp, Mus musculus
acgcggtggcggcgcggctcgaggagaatctttgccctgtgtgtggttgttgctgcctccctgaatggaaataattttcactttccacctgggattctattttccactgagcagtcaatgtagaccagaatgtggaagcagggataacctcagataattcacagagcttttgccagccagaccagctgaaacttaggtgactagggtcctgagaaacaactgagggcagtggccttcttgagaaagcttcatgtttgggtgagggtgttagaaatcattattgtcaacaaaaagtgaaaggtccagtctgagtgctggagggacctgccaggtggccatgctctccgcagatgtgttctggccatcaccaccctgccccaaacccatagcagttctctagagttctggagagggatagaatgaaggatcccaaggaattggagtaaaggtttgtgcctgcaggtggggctaccttaacccctcatatttataatcttaatttatagtgaccatctggagcagattcctcttgtattgttatgtacatagtctgcatcagagagttgtaaataagttcttctgtgtataataaaacaggcctgtttttgatcttccagtgagcattcctgtcctcatttctgtgctgacagttgctagcggttctgaagactcggttgctgacttggtggctataaagcagaacagagctgttatattccaagggtctg

SEQ ID NO: 2859 - DNA, 420 bp, Mus musculus
tttttttttttatgtagactagtctttattgaaagacttacttcaacgggggtttacagcttgggctttagtgggcctctcacgggcggcaaacataaagatcagacggacgggcaccgaggaaatgctagtagaaaaggattcaagcacagacgatggcaggcagaaacacaccaagataaatctcaagaaactatgaagagacatttccttgcatgccaaagagtctctctgctgttcttgacgaacacaggaaagaaaaggcaacagttcttaggcttaaagtggacggagggcacaaactcaaatctggctttggtaagacagtctgggacctgtgttagcttgatcatctcatttcctaaaatgggtggcattccatttggcacatgtcctttctatcttaaaactatttggctg

SEQ ID NO: 2860 - DNA, 387 bp, Mus musculus
gcggctcgaggcggctcgaggccagcagctgtccaaagctcaccagataaagctgttttttttttttttttaggaggaacacaaaagtgaaaccacttttgcgttgtgagtagctgggttccctagtaataccagtgaagattctgggaagacctgtgccagtgttggggggttcttagtaacatggtttggtccttggtatgttagaaaggtggctgggtttcccccgaaggattgggtttccttagggcattttaataaccagtgaagggtgctgtgggggcatcaggtgagttcagaattcagatttatatttagtaggttaaggttcgtggtgagtggagtcttgcgggccctttaaattctaggaacaaatctcgggggtgg

SEQ ID NO: 2861 - DNA, 805 bp, Mus musculus
cggcgcgggtcgagggacattgtcattcccaccctgatagcacttggaaagagacatttcctccctggtgcccactacaggagatgtgggtgatttttaagtaactactggactgcctaggaagatattcccagagtccgaaaggaactatgcacatagagaaaatacagttttctcctacctaaggaaactattagtattctattagcttatatttttaataactaagcttaaaacatagtttattttggatattactagaacttgcagcaattctaatatctgtcaggtactcatagaatctatggggaaaaaaaagataagactgtgtgattaggaaactttgtgagtcatggcatggccagccagtgtcacaaagcaaccctgtgcttggctagctttaagcattacagacttagtacatgaaaagacttaattatattggggttcaggaactaaagagtcaatgagtcatctgtggaggtcaacaaataacacactggtgggctttttgtcctccgtcaagctggtgactatagtgaaatgaagcaggaagtgtagcatattccccaggatgctagttccagactgaaccagcagactgaattcacagcacgtgtgtgtcaattggaactagcctagttcattatcacctctactttctgggcagttgccaggatgcaggagatgaagaaagctacaaagcactgctctctttgagattctaggttttcttttcttctcatcatggtaatgaggggcagtgaagccagaggtttaaatgagcatagacccatggtggatg

SEQ ID NO: 2862 - DNA, 736 bp, Mus musculus
gaaaacttcattaactggtcaaacaactcttacatttccctgaattgaggcatctggcagggactggcaagtctttcttgcatgccaactgggatcatgggcatttgaaatgccaggaatgtactactgtttctggtcttgctcttgtggtcatttgaaatgttaaaagtcaaagagagaaaaacttgagaactgtggttgagggtatgatgtccatactttctgccagttgtacaatgcagagaacatctgtgatgtgtctcaaagtggatataactgaactgttttggattcacaaagctccctgtctgctgctaagaatagcacaccaaggaaaatctgacccccaaaatccaattggccaaaacaaaggaaaaattgtgggtgagcagggcccattgccaggatgggtcttaccattaatgatagctttctgtggccaaccaaatttgtgtctttcaggtgaagggtggttttgcagaggattttccaaacttttcttactgcaaggcttgaaaaatcagcatttcaaacttcttccagtctctgggcgccatttctaacttttctgccatgtccaagaggcattctgagactctttctattgtgctatcatagtctataatagtttgccatacttctcaatgaagtcaccctgaacatagaagagcctgaaacatacacagaataatatctgattctgcatggaagatagctgagagcaaaaggtgtgtga

SEQ ID NO: 2863 - DNA, 768 bp, Mus musculus
gcggctcgagagcaatttgataatctttgtctctattctatcataacactcccaggtgtctaatcatttggaagggtgccatctctagtttcttttcccatatcaaagaaagtgcaaatattttaggggcatcataatggtaacttggacattaattaggaagaaactgcatttgtggttaaaaatatctgtaaagggggccagtgagttcaattagtaaaggtgcctgccaccaaacctgacagcctgtgtttgatctctagaagatgtaaaagctgaaggagagaaacaataggtttgtctggcctctctgtagcaagcatgtacctgaacatgcatatcactcatacagtaattaaacatcggaatgattcacatccacaaggtaaactatgggaaggataaacctctagtaaacatgtctagatctgggtgtttggttttcccttcaggaaaaatggctgttgctgacagtttgaaaaaaaaataattcagggacccaaaaaggaacatttaagcagtttcccctttcaaggtttataaatacaacggctgagagacaatgtgtgagtaaattggtggctttcatcaacggtgacaaaactctttagagataaacaggaagtgctggcacacacagccttgggtgatgacacgagagcttcctttgaagcaagatggcaaaatgcatctggtggtagagacaatgaagtttctctttccaaggaaaatgacaaaacactttcaagacacccttggtttgtagat

SEQ ID NO: 2864 - DNA, 606 bp, Mus musculus
  misc_feature (149)..(149): n is a, c, g, or t
cgcggggcggcgcggctcgagcctgcatcaaatggtcattagtttttccatttactcttcagcccacagtgatctaggttctgatccaaggcttccacaggaactcctcttgctgggattacaatgactttccagttgttatatccagngaacattgtttaatggttaactcactggggactctcttctgcactcggcctcagcaatcacatcatgcctcattgttttcaggactgtcgtttgtactggatccacttctctgagctagccttccaccccacccctagctttctagttcatgttcttgccttggtatgtatatctatgaattcacaccctccttaatggacatgttctttgcacaagctctctccataggcaggggaatgtttccatttccttgacatcaatttgagatagcttatttacatagcggggaatgtgactgctcacatatgcttcaaatcaaagtgtatgaggctataagcatgcagcctctttctacagacccttaatctgtctgacttgaccccgccttactctgctcctttctattctctccactgctctctatccaaccagaacgggaaagtcctgtttggctcc

SEQ ID NO: 2865 - DNA, 671 bp, Mus musculus
ggcgcggctcgagcggcgccattgtgcaaacggcgcccgggaccggaggcccgagcgcctgggtccccgaagcgggcgcggcacgtagccgcaggagcccgccaggtctgtggcctgatcacctaggagagccactcctggtggccatgagagagaccctggaggccctgaactccttgggattctcagtgggacagccagagatggctccccagagtgagcccaggatgggttcagtaatgcccaggagaagatgtcatccagaggagagagcacactgcactcctgctcagggcatgagactcctgaccagaaagaaggcatccacacagaacaagctgaagctccttgtatgggcagccaggccagtaccccacagaaggccgaacctgcaggctctgtcccagtccttttcccactcctgacttgggtcagttggctgttacgtacaaactggagccaggactccgggagcactaggtggaatcgcgctgtccgggtgggccccgatccctgagaagccttatggctgcgaggaatgcgagcggcgtttccgggatcagctaactctgcggctccaccagaggttgcaccggggtgagggtccttgtgcctgcccggactgtggccgcagcttcacgcagcgtgctcatatgctcctgcaccaacgc

SEQ ID NO: 2866 - DNA, 821 bp, Mus musculus
cgcggtggcggcgcggctcgagtgccttttaacaaaaaaaaaaagttttcatttatcatggatgctattcctatttatgaataatgaagtgcaggtggactcgaccttttaaagttgcaaaggttgagaaatttacttgcgtgggttcacagggggggtagagtcctctgcctgtgattcctgctaattagaatttagctgaaacgtaagtgaatctgtcagtctcagttctaatggggatgggcatatgtgtcctcagtgggtattttccatggctttctctggcatcagaaacaatgaaagcgatgtacaaaatcattgggaagggctagagtagtgggtgtgaaaatggtgaagtctcgtttagctgtagaggtgggcttggtgggtttttggttttggtttttggtagtggtatgagtgtggcgtgcatgtatgtgtatgcatggcgcatgtgtgtggcacccacaaaagttgaaagggactggttccataccttggaactgaagttacaggtcattgtgccatgtgagtgctgggaatcttctgaaagagcaacaaatgctctcaactactgagctatctccccagcttctatgtttttttaataaaatgtggagtagattggtcctggtgatgtcatggggggccacagtttacagacagagctttctgtgtctcatctggccattcaacacatttaatcttatttttcacaagaaaaagctaaatgtgaaaataagtgagaacacagcatttttatattcatgagacatagtgtatttgagcagatatttcagtctcagtatccagaaagaacc

SEQ ID NO: 2867 - DNA, 366 bp, Mus musculus
  misc_feature (87)..(88): n is a, c, g, or t
aatatgaagtatagaaaacctcactgctgaggtatttaatttcacctaattgttcctatgtcttcagagccccgtgttagctacatnngataaagtgtataggaatgcttgtaatggagtaatattttctgcccacatcaaatttgactgctgctcttcaggaagctgaggcaggagatgagttcaaggtcagcttgaactgcatagcaagaccctttctcaaaatggcgtgtttgtgtgcatgtgtgtgagtctaagttgtccagagttacgttttgatattggatgcgaaagttaaaagttgcaacaagtaaaattgggattgtagcgtttacttgatgtttcatcttaacttaagctatggtc

SEQ ID NO: 2868 - DNA, 708 bp, Mus musculus
cgcggggcggcgcggctcgagctccaccacaagagtcgggctgtcccgcacagctggaagagcaagttaagaattctgttcagacctctgttgaggattcctccagtaacagccagcatcaggccaaagatagctcacctgggtcactccctaaaatcccttgtctgtcttcttttaaagtccatcagccgtctactttgactttgcagaactggtagacgattatgagcactatattaaagaggggttagagaaacctgtggaaattatccggcactacacagggcctgaggcccagaccgggaatcctcagaatggcttgtgagaaatagagtttctgaagatagagcacagatgtggtgagtagtagccagtctggagactcagagagtgacagcgattcttgcagctcaaggacttcttcccagagcaaaggtaataagtcttacttggaaggctcctcagacactcagttgaaagacactgaatgtactcctgtgggtggccctctctctctggaacaagttcagaatggaaatgataccccgactcaagtggagtatcaagaagcccctgaaacccaggtaaaggcaaggcataaagaaggcgctaaccaaaggtctaagcaaagtcggagaaacccagcacggcgttcttcttaccgagtacagtcagaaccccaggaagagagttggtatgactgtcaca

SEQ ID NO: 2869 - DNA, 743 bp, Mus musculus
cacgcggggcggcgcggtcgagcacaaatataattatactattatataaatcaaaacatttatcctactaaaagtatggagaaagaaattcgtacatctaggagctatagaactagtaccgcaagggaaagatgaaagactaattaaaagtaagaacaagcaaagattaaaccttgtacctttgcataatgaactaactagaaaacttctaactaaaagaattacagctagaaaccccgaaaccaaacgagctacctaaaaacaattttatgaatcaactcgtctatgtggcaaaatagtgagaagatttttaggtagaggtgaaaagcctaacgagcttggtgatagctggttacccaaaaaatgaatttaagttcaattttaaacttgctaaaaaaacaacaaaatcaaaaagtaagtttagattatagccaaaagagggacagctcttctggaacggaaaaaacctttaatagtgaataattaacaaaacagcttttaaccatgtaggcctaaaagcagccaccaataaagaaagcgttcaagctcaacataaaatttcaattaattccataatttacaccaagcttcctaaacttaaaattgggttaatctataactttatagatgcaacactgttagtatgagtaacaagaattccaattctccaggcatacgcgtataacaactcggataaccattgttagttaatcagactataggcaataatcacactataaata

SEQ ID NO: 2870 - DNA, 667 bp, Mus musculus
gagaagaagcgagatgctttaagcaacagcgtgaggttggcatcaacggggcacattgttcttcacagcaagcccagtgttttcccatcttacccaatgtggagctgggtctgaaagtgtgccaagtgatcacctatgccaaatagcttttagtctttagatggccttctgactgtccaggtcctaagcctacagtaatcacgggcccagcctctagtgtgttctcttcccaagcaggtggatagtggagagagccctgactcaatattcactcacacatcattggtgaggagaagctaggaaggcaggcatttgccacttcatctatccacaggaggttccttgaagtctgccctgagaaggaggtgtctttgctggggaggatcttcatcatcagcatcaagctgtgaggggaaaggctttgacaaaagggttgccactttctgaattcttctcaaagaggaatttctaagccaagctacagattcatccaggctcagaattccatggctgtgggcaggagctgtcatcttcactatattttgagatacatttttttttaggtagaactcgaggtccagatctagagggggataaggacgatgagaaggataaagttgtggcagttgagctaaaagtcatgttcgagtttttggtgggtctgact

SEQ ID NO: 2871 - DNA, 767 bp, Mus musculus
  misc_feature (687)..(687): n is a, c, g, or t
caccgcggtggcggcgcggtcgagaacctgagacaggagaagagctgggatgtgctcaaggcttcacagcaacgtagtgacagagccacagatgaggagaggacattaggtctgtcccatctctgtctcacatatgcaccccaccaccaccaccagggaccaatgcgttctcaccacacctgctgaccccaagggtcctccaaaccgagtccagccctggcctctgctgttgccatgctggtgtccccaagccagaagatgttatcacttctaagttgccagaggagggtccccccagccaccacaccagagatgccctggcagccactctcagcattctttcaccacggctgtggcctgctgccctgctgagacaacatggctgctgcagggacaagggcttctgtcccgtgggaagagacagcctttgatcttgcccagaccttgttagatagcacactcaggcttctggaactgaggctggaaggaggcagtggtggagggttgaaggtggggggtggggctagcctgcagcctgaaagggcagagggatatgggagaatgaggtagaaattgagagagaaaatccaagttccacctcctggctgggggtgtggcatgttgaggctcaggcagagaggaaggagcctgtccaggtgtcacacaggagtgacaagaacctgagcnttgtcccgcttggagggcgttgttgcagctggactggggccagggccaccatcgtattctttccgtttaccttgtacaga

SEQ ID NO: 2872 - DNA, 564 bp, Mus musculus
  misc_feature (255)..(255): n is a, c, g, or t
gtctggagttccaaatgggcaggtcacaagaaggtcaccatgccattccacatctggaggaggactgtgtggtggagtttgcatagcacagccattggaaagggaagattaatgacagaggctagggttggccagaggcagaaggcccttcttactgtctgccccaagccctcagtggaactgtgaacaaaagttggaagagcctggagaaatttgaatgatggagttcccccgctaagacactgagaaaagcangcaggatgagacttgctgtcagtgaaagggctacagactggtggtcaactgctttggaggacttgagccattgactggtgtcttctaaggagaaaaaggctttgccaccagagctgaatctagcaacgattggcaccagtgggacatttggtgtccattctctgaggccactttgtgatctccagccagactttggcacaatggacctgctggctttgtgctttgtgaagttggaggctctggggggtggggggtggaagtggggaggaaagcagggaagggtcaatatgcagctggttcattcatact

SEQ ID NO: 2873 - DNA, 702 bp, Mus musculus
  misc_feature (380)..(380): n is a, c, g, or t
agctagggaaatatttgattctctgattgatgctgtccccgtatgtcaggcaactgccctctaccccagagtagtcttctgccccttagaaaagccttcagttttccatcaaggggtcatttctcatggaagtcttaccttccttttctgctgtgcttagagctttgaaaatgaaagaatttctgcactttggggattggaatagttaaaacagagcatagtccttggaggaaaaactatctttacctgaactgacaggtctggggccaaagaatggagccaaccactgataaaagtcattgattttatacttcatatcatcatggcctcctcaaatcctttttggaataaagctggggacaaatttattttcttttctntggatgtttcttgtgagtatccaggacagaattcccagaaaggaaacaggaagacgcattagtaaaaatactcacggcatctgatcttcccactttcacagtagtggggacttcagtcatggccacttaaagctctctatggtcctaaggcccctccctggcacagagatggtagtaagaaggacatctccaggctgcagcactcgcctatccatgcctagcaacacaaaagaagaaaacagcaaattaagactggggaaaggggtcgtagtcccttgtcaaagcatgctctgtacagctcagcttagcttacagatagctt

SEQ ID NO: 2874 - DNA, 802 bp, Mus musculus
cgcggggcggccgcggctcgaggtttccatctccaaagagagaagctaggtttctttcttcatcatgtggaggtgtcagagtcatgctcactccatctgtcagcagtgctgggactattcaaacggccaatagatgagcagtctgggaccccctcctacatcctccttacaggactttcagcaaggactgagttgggtttcagggggagctggcacttggctgctttgatggatggtcaggcagctcgggcagctcagaccaccagcggtggctgaggtggtgaagtgtgtccccgttaacaccactctgggcagtgaactggagagagagcaaagcccaggaaatggacctgtggcgacggtgggaagagtgacccacagcaaagctcactgcttttcttgggctattcagtcattctagggcttagaaagagttgggaattttagcatgagagacgggagaggtgcatagattctctacaaaggcattacctgcatgtgtgctcttgtgaaggcacagcttttcagtgctctccttaaggatgcttatctatagctagagggcagattcaggctataaaatgcttgcaaggcaaagcacagagacctgagttctgtccttagaagtcttgtagcaaagctacatgttgcggagcacatgtaatcccagcactggggaggcagagacaggcagatccctgctgctctctggccatccagcctaggggattcatgagtctaaggccagtgagatgcttcgtctcaaactctcaagaaacggtggatgacatctaaaggatgt

SEQ ID NO: 2875 - DNA, 728 bp, Mus musculus
gcggtggcggcgcggctcgagatgacaagaacgtggcaggcatgacagttggaactgcaaggttgcatcttgatccctctctgcaggagcagagagcaaactgagaccggtgcatggcctttaaaccttaaagcccgcccacagtgacatactttctccagtaagaccacacctcctaagccttcccaaacagcgccatcaactggggatgaagtgttcaaacatctggagagggacatttttgtttgtcacaggctggaggtggctcagcaggcaaggtgcttgctgccaagcctaaggacctgagcttgatccaaagaattcatgtagtgaaacggaaagaaccgctctgacttccgtgagcaaacacttgcaggatatctgactacgaagtgaactctaagactgtgttatttactggaaaaacctgtttctagttgtagtgcggctcagccctagcacacacctttaatccaactgcgttctttctgtttattgtcaatattattaaagaaagtcaaccatcagtcaaaggcgttagcaagcaaccagtagacaggaaagccagagagagtgagaggaagtcaggaggactgggcagagagaccctggagtagaagggagagacattgagtttgaaaggttttcggggtgctgtggagagggaagggcttcctttcccttttggggtgttgactgaggaggaaggtcagcacggtgctttctct

SEQ ID NO: 2876 - DNA, 671 bp, Mus musculus
acgcggtggcggcgcggtcgaggagtaatgaggaagaatgcagaataatttctttcttcgtgttggttcttatgtgaaaattaattttgtgttgtgttgttgaccatggtaacctagcctgggccttcacaatattggttggaaacattaaacaccagcaaaaccaaaacaatatcaacagccagtgttccaactttgggccaaattgcatggcttgtactattcccacctccaagaacactggctgtctttctattcctttctgactcagtgtctcccaccaaaaggagcaccagctgagcctcctcctaaagcacctcttgtcacctcccagaggaagtcacgttttccacagaactgtgcttcctggctttgaccttgacaaagaggttccccccccccccatgtctacacaaggaaaattttctcctgtggtgggaaaaaaaatgaacctctcccaaatttcttgacaccctccagagggaaactggctcagtgttacccctgtggtatgtgtcaggtttttttttcctttcttaaatggcttatctgcaacttagacatatctatttattttttatgggcacaggggggggtgggagagggtagtaaattccagatcatgtccccggaaaaaatagactagaatatgcagctagctgatatgaaat

SEQ ID NO: 2877 - DNA, 930 bp, Mus musculus
agaaatatgttcatgttagggaaagaaagacatgtattaaattagctatctgaacacactgtaatatgtatttagtatcaactccctctgcccacgtctcagaaaacgctgcctttgcaactctcggttcttctcaggactgagctccacagtgagctgatgaaatgtcttcttccaggattaccatcactcttggcctaccccccagttctctggctgaggcaacattcctggtaccagtgcctatcactttgtttcaggactgcctaaatcttccccacatgttatgataaaattatatcaagataaaatttccctttgggagctaataccagtgttggccaaagaataagtacatgcctactgaccatgggcgccttatagaattatgaccaggtgattcttagaagcagaagcagtcagggaggtttatttgtttttgttctagtgactgacctgagaggtcacagtcataggcactccttccacatcagatggtgacagcagcatgagctattaacaaccacccagagaactggattgtatatgggttatacccttgagggcaacctgtggattttaaggctgttaatgcagcttaatgagaaacctcaaagcacagaacagcacatgaacagcccgctcatgcagaacaatgaaatttattatttctggtcccaaacaggaagcagaacaatcctaaagttattaaagcaaatacttcattagcagaacctgaatgttggctgggtgtcactcccaggaagttctgattatatatgtattcaatcatgctcatccaataataggttcagaaacctgtctgggtttttttaaacatgtattttatctaagcatttctttttattttttaaacatttctttcaaaaatactattatcattgggatactcagtgaaatatagtacta

SEQ ID NO: 2878 - DNA, 198 bp, Mus musculus
aagaatcggatatcagcttattcgatacgtcgactcgtagggggggcccggtacccagctttgttccctttagtgagggttaattgcgcgctggcgtaatcatggtcatagctgtttcctgtgtgaaattgttatccgctcacaattccacacaacatacgagcaggagctaatgtaagctggggtgctatgatgact

SEQ ID NO: 2879 - DNA, 771 bp, Mus musculus
acgcggggcggcgcggctcgagaaagaaggtcagtgtcttgtgtctgtggacaacaggatagggtcctgaggcatgttagcattcctcactggtgtttcaggagagctgtcgggagcaatattagattccctctctatgcccctcggcccaccacattttctcctttattcacgaagaccgtcggctttctcactgagcacagacataacttatcaggcgctgctgccacagctgctcttgttcacatagtttaacatccttacctgtgctgtacacatgcagaattttattgggagtggggttttcaagagaatataattttatattagtgtaagaatattatactaggcaaatgtttagttatctgaattacgcttaaggtattgtaatttaataatggcaggttaaccagaagtctactgaaacgtaaaattaactggaaataattccttaaattttatatttttgaagactttagcctgaaacaaccttttactttagaatgttgaaaatgcatgctgcttaagatttgtctagttcaaaattcaaaccttgctgggtcatttttacacagggaacatcctggtagccatgtattgcctggtggatgtttttgtttattttgaattctggacacttttgggataaagaatagttaaacttgccacctaggacaaagctggatgtagcagagctggttgggggttggggttgcaacaaatagaaaacaaaaacagtgagctcagaggaatggagcatcatgtaggatt

SEQ ID NO: 2880 - DNA, 648 bp, Mus musculus
ggtggcggccgcggtcgaggatgtggtcctcgcctcttaacatgtctgcttggcagctctgcccttcgagccagcggttctctgtctcacaaggctgcactgatgggggtggggaataagatggctaagggctagcttcaagtgagatccctctttcaaagtggtttctgcaaaagcccctggacttagaaatcagaaactctatagctattatatttttctattcttgttttgctatttttacttctgaaacatgatctctgtctgaaaagacgctttctccgggttctcactctctccctattgaccccctcacactgaaagttccaccttatgctctgaacttcctacgctgacccaaaactaagtctctcagtgggaaccccaactctggtacttctatttaaaaatagtaagatctgcttcggaggaaactctagctgttccccaggaaaaccagtgaggccccacactggctctgtccaggtctcacagcaagccttgcttcttgaaatctaaactgatttaatgtagtcccttcacggtacctgggtgttgaatcctgggtaatgaatggcagaagtattttgcacagcttgtatttcagtaatggacaatgggtaatctagacagcctttaagtaggagt

SEQ ID NO: 2881 - DNA, 849 bp, Mus musculus
caccgcggtggcggcgcggctcgaggttaggtgcctgggctgggtctctgagcagaaccgagtcaaagctcaggcgctcctctgcgaaaacaaggaaaaccacggtcagagctcccggggtttgccctctcaggttgatctttggaaccccattaaatccgccaaacacctgtgtttcatcgtagacacacattccatcctcttcatagccttctcgaaagcagcagttcatatctcaaagtcacattgctagtcctttaagttttctctgaaatgtctaattcaagaatgaaaaatttggattacgatattgttagttaaaaaaactaggagggggaggaccacagcagtgggaggctgtttagggctagaccctacctacatttttgcccatcacgtgtccacacatccttaccagctaccactcttaaaaaagaatccttgagaactacttttctgaacctgcctgaaacttccaaggtcttttgaaggtattttccacccatctctagcagatgagcttaataaaaggccactttctgcagtgccttcaatgtaaatatgggagaggacaaaaaaatgttatgtgctaaaaaaaattataacactagaaaaatgtgaggaaatgctcctaagtctagtgtgtagggcagcccaattcgaagcagaaagcagggggtatgcttttagggttctcaaattacaggacttctgtgtttgggatcctcaaatatagggaaagtaccaaggttctatgtgacactgaaggaaaccttcgagacattacctattgtataggtagttgggctactattcctgtggccttacagttcagtcaccagtactacc

SEQ ID NO: 2882 - DNA, 823 bp, Mus musculus
ggcttatctaatattcttccaggaggccgggcttgtctcgttttctaacagtttgtaatctcagcaccttggccacggtctggcaaataacggacattcaccacgcgttagttgaaaggtgctgttgagcggctgccagcttaatcctcctaaagtgctgcttgggttagaagctgaccgcttcttcatccacggtagggcaagggccagcctccccagaccgcattcaaggactttctcaatgcggttctcctcgctggctgtatcaaccatacgctgtgcccatccactaagctcttttctgtcaaggtctgcctcttgctttaccacagccgttccctccatgcaggaaccctctaccctcgatcccaaagctgccccgttcccaggttcatctctacagtactccccgtcaagtttgagccgttctccccagtgccgtgacttggataattaaatccctcaaaggtccatggattcaaggcttgatcccagcttggagcttccctggaactttaggcaggtcggtacgtccttggggcttggtctctgatggcaggagcccattcttcctttcttgttcttcaggcattagggatgcagttttatgccacataccctgcaacatcaggctgccatttggctttgagtgttaattatagcccttaatgttctttccctggcttctcattagctttaggtatccacaaacaaacaacttgcttcctgccttttccggccccccttctctgtggtcccccacgccttccgttggggggttggaggccagggtcttatgcatggatgctaggcctgtactcag

SEQ ID NO: 2883 - DNA, 746 bp, Mus musculus
ggtggcggcgcggtcgagaagataccagatctgatctgctgcttaaggaactgtatgtggaaaatgcccacctcatgaaagctgttcagctcacagaagagaagcagcgaggagccgagaagaaaaactgtgtcttggaagaaaaagttagagctctcaacaagctgatcagtaagatggcaccagcatcactttccgtgtagaggctgcttttcttggagttcatgtgaaggaatgtctttttaaataatgctactctgatgccataattttctatggctcactagctacacttcctagacatgaggactgattcctgttcacacaacaaatattcagtgaatgtctactatgtgccaggttctggggaagcaggcagggtacagtcacttttggccaagggtctgggtaacatcctgggttgaagttgccaagcttcatcttactgaaaaagactcagaccctcagcaaagaacaatggagagaaagtaggtgagtactttgagtgttgggcttgggccaaaaatgcagactcaggttttaggtgtcttaccacatggctgccctgtgcaggctgtcatcagagttctccatgtgggtcaatacctgcacccccaggaagagggcattccccagcaggcctctgcagatcctgcgggtgggaggaaagacggcatcagaggtggtggctcagggatagcagtgttcgttgcgagtgcaatctcattacaaaaaaaaaacaaaaa

SEQ ID NO: 2884 - DNA, 882 bp, Mus musculus
cgcggggcggcgcggctcgatcacaaatataattatactattatataaatcaaaacatttatcctactaaaagtatggagaaagaaattcgtacatctaggagctatagaactagtaccgcaagggaaagatgaaagactaattaaaagtaagaacaagcaaagattaaaccttgtacctttgcataatgaactaactagaaaacttctaactaaaagaattacagctagaaaccccgaaaccaaacgagctacctaaaaacaattttatgaatcaactcgtctatgtggcaaaatagtgagaagatttttaggtagaggtgaaaagcctaacgagcttggtgatagctggttacccaaaaaatgaatttaagttcaattttaaacttgctaaaaaaacaacaaaatcaaaaagtaagtttagattatagccaaaagagggacagctcttctggaacggaaaaaacctttaatagtgaataattaacaaaacagcttttaaccattgtaggcctaaaagcagccaccaataaagaaagcgttcaagctcaacataaaatttcaattaattccataatttacaccaacttcctaaacttaaaatgggttaatctataactttatagatgcaacactgttagtatgagtaacaagaattccaattctccaggcatacgcgtataacaactcggataaccatgttagttaatcagactataggcaataatcacactataaataatccacctataacttctctgttaacccaacagcggaatgctaaaggaaagatccaaaaagataaaaggaactcggaaacaagaaccccgcctgtttacaaaaaattactctagcattaacagtattagaggcactgctgcca

SEQ ID NO: 2885 - DNA, 714 bp, Mus musculus
ggctcgagcttatgtagcccacatggccaactttgctacttgaaattattgcagaatttgaatcttgtttcccataggtgacagacatgcacagccacgcagtttttccttctttcctttcttggggcttcatgcatggttttggtgacttttcctgcggtggtaatgaccaaatgtctattcacccccgaaaaaacaccagtcatagaccaaagaaaagatttcattcaatctagtggggagaacctgcaaggttcttggatgcatggaggagtgtgagactcaacgaataggctccccgtgcagtctgcaaactgcagccctggaggtcccttcccctagcttacttctgctgccttacagtgctgggcggggcctcctcagctcagaactttctgggcttctgagtctggtaaattgctggaccttctgcttctcctataaggagaattttagttcccaagtaattggtgcataatagctgcaaagctagtgtcccccaactgagctgcaccccaacaccaacgttctccatttcagttgtgttctggggaggtcaaggctgctgctggccactgcactggctactcttagggaacactctttgcctctgtatcccagcatacctgagacttccagtaggtcactttttcagagtaaggattgttgattgcggtagttctctctgcccccacccccaaaaaaagaattcgg

SEQ ID NO: 2886 - DNA, 794 bp, Mus musculus
ggctcgagcaatcacaaggcactcatggctggaaacttctagaaaacttcaatgcaaagcaagtggataaataattgaactttgtatgatttgatcaacaccaaggaggaacacagtgattgacacatttgaatttgggaaggttttctttaattgtattgcttatcctgattcacttccacaaaggcattttctagaaaagtttttatttccatttgtgttgtttttaccttgttgaaaaatttagactctcgatatcttagagaaagttaaaaagataacttggttgttgtttcatgttattaagtgggaaaatagtcgtagtttactctctgttgctgttctctgttgctgtgataaataccacaatcaaaaacaacttagggaagaagaggtttgttgaggataggaactaaagcaggagcaggggatggaatcgtgtaagaaaggtgctcctatagcgcatgctcagctagcttccctgaaccgggactacctgcctgcctatgggtggcacttgtctacagcagaccacattagtcaacagtcaaaaccattccagacatggccataggccactctgatctgggcaattcctcactccctcaattgagactctcactttccccgtgatgttcttaattctctgcattaaaaataaatgagccatacagaaacaaaaaagagaacagttctgatgtctgtacacttaaatgataaaacagcaccaaaattctagggcttatgtcaattaatgcaaagatatgaagactccagctcacagtttcacaaat

SEQ ID NO: 2887 - DNA, 783 bp, Mus musculus
  misc_feature (775)..(775): n is a, c, g, or t
gggggcggccgggctcggcccatggaagccaaccccaactgaagctgagataatcagaccaggaagtgaaaatgacattcaaactaaattatttaaaacaggcatacctctccccaactcagtctaaagacacaatttcattttgagaatgtttacagcccatttaattaatcagtgaactaaaagtcatagaaattggatttgtgcaaatgtagagaaatctaccatattggcttccaaaatttaaaaattttatgccacagaacatttcatccaaatcagatttgtacaatagggcacctgaaaagtgactgcagcctttggttaatatgtctttctttttcctttttccagtgttctagttacattaatgagaacagaaacataaactatgacctaggggtttctgttggatagcttgtaattaagaacggagaaggaacaacaaagacatattttccagttttttttttctttacttaaactctgaaaacaacagaaactttgtcttcctactcttacattctaaaccgatgaaatctttaacagattacactttaaatatctactcatcattttctctctcagagtcctagcttgagttgcactgcatgtatctgtgcatcttgttctcttcatttaatgctgtactgttctgctgagctctgagggactatcttgagagatgtaatggaaggaaagcgtggtgttaatctgcgtactgcttaagacagtatttccataatcaatgatggtctcatagagaaactaagtnctatgaac

SEQ ID NO: 2888 - DNA, 324 bp, Mus musculus
ggctcgagcttctggctgaccaccgtgaacccagacctgcagtttgcctctggcccgtcaccagacaccttgaaagaagttcaggcccagcgccggaaaatcagcaggtgccaggtttgcatgaagcacagctaaagaattcaaaacatgccaacatgccaacccgcatcaaggcagacatccagtggaagacaaacttcctcaactattccagcaaattcagtggtgctctctccagacttctgccatgccttgttctcagcgtggttattcccggcctctcctcctcctcctcctcctcctcctccgtagcgccgccgcgcg

SEQ ID NO: 2889 - DNA, 849 bp, Mus musculus
ggctcgaggcggctcgagctcagataagcagcctgtgtagacgccatgtgggggaaggtggattttatagggctctgtggtgtgtgttttacgtgtcctttgcaagcagacataccgtgtctcctgccagttaggaaatatgtgaatactatgagcttcctatgcttggaacgtgactttaagtgtggagaatatgcaccaatacctgccgatctcagaaatgcagatgtctgaaatatctgtctacatgtgccaaatttacatttatctcgaacagtccgtgctgatgaatactaaacactcatctggtgtcttatacaggtgtgcacaataattgtgctgtacaggaaggagcatagaaggggcacctacatacctttaacttccactaaatgtgtcagagatggcaatgaatggacaaaagtactctcacggtaaaggaacaatagcttgtcacatcttagaactgagacgttaacgtaaaatatcaacatgatggaaagctggaggaggccagttgggcatgttcaagccaaaactctggagtcagattatctggactgaaacttagcccagcagctgagtgattgtatatctttagatgtgactcgggcaagcctcactttttttcatttgaaaataggaagaacctctgggtgtggttgcgcactcctttaatcccagcacttgggaggcagaggcgggcagatctctgaattcaaggccagcctggtcttacagctcaaattccaggaccggcagggtttcacagagaaacctggctcagggaaccaaccaaccaacaaaccaaccaaccacaaacaacacaacgaacaagcacgccaggca

SEQ ID NO: 2890 - DNA, 686 bp, Mus musculus
ggctcgagctcatcttggcagaacctactaccctgaaccagcggcatctgcagtttgcagagtccacagatccacgaaaggggaccaaggacatgatcctgggccacagtccctgctccacctgaccactttccttcttcaccgtcccgggaccctcctcttctctctgcctaccccattgacatggccttcactagctccctggaccctaatgggagaggctttggtttccttcaagtatcctggaaggactgaggcagttgagtccttatctcgacacatgcaaagccacctgtgccacttatataacgagagacctcagctggcagtctggagacctatcccaagtttgagcctcccagttttatggtcctcttaggagctctatgacctatgggcctcagatatcctttctgttttgggctctacagcctctggatccactgggccttggcaacccttgttcttggctcaactattgatctctgtgccttagtttacttcttcacacagggggctcacccaccacatcattcctagcatctatccagaccttttggtgcctcttcagttaggccttgccaatgtgatcaaggcagctggggcaccaatggcaactctgtccccatagtagaagcatcaccagggaaattggcagaagtgcagattgttggcccccaaaaaaa

SEQ ID NO: 2891 - DNA, 616 bp, Mus musculus
aaacaccacaacaaacatgggcaggagcatcttggcagcagtaagccttcagagaatcagcaaccagggccatcagagacgactctgcctccttcagcttgcaccaccaccacaggcataggggccagcacaggcagggtcacttagagagctgagacaccacagcaagtgaaggcttgcacctttcacttgcccagaggaagctctgacgaagggggtgcatcaaccagctcctgtgtaagttgtctaaggagtccgaggcagcccccagcagctgctgctgtcactgccgccacctcatatttgagaagtcagggtctgcaattgcttgacagtgtgcggaaaacctcccatccttatgtagctgacaggggcttttcgcggaggagaaagtcactgaatcctgtcagtgtaggtcacctccagctgcctgacaaaatcagcccatgaaccccatggaagccaaccccaactgaagctgagataatcagaccaggaagtgaaaatgacattcaaactaaattatttaaaacaaggcatacctctccccaactcagtctaaagacacaatttcattttgagaatgtttacagcccatttaattaatcagtgaaca

SEQ ID NO: 2892 - DNA, 801 bp, Mus musculus
ggctcgaggttaataatgtcaacaaagtgtgttttcagaagcttccagggtgtgaaccacattccatatcccctctctaaatgtgagcagccttgaattcccaagccgggtagagtgcatacaaacaactctgaaatgttttaaactcctggaaaaagtagatccttctgcaacccttgaggttttggtgcacagctcattagcatttgaacgaatctgtgagactttcaggcaggttgctgggcggagagctaactagactaatgcagtgggttccagagcctaatggctccatttatcaagggagcaggttttaaaataatgcataaaccttcctcacatggccgttttactatgcatttaattctacggcaacatggctctgcatgcggagcagatgaagttgagtaaggctaaccttccgggaaaagacaaaggttaaaaaaaaatcaatactcccccccttcccaaataaaagatgatttagaaaacatggaaatctctattgatgacagactctgacagataacaaaaatgtgcagctgatacctcgggatggggacatgagctctcatttgcaccgaatctgcattcagcattgcaaatgatgctattaggatgctaccgtggactcacgcctgatgactaataagttaaaggccttcctgatgctttgagctttaagggcagtgaaaactcccatgtctagtctttattccatgttcatggtctccttcttttcctagtctctgctgaccgcgggagaccttctgcccacttccggaagggccactagagttt

SEQ ID NO: 2893 - DNA, 742 bp, Mus musculus
ggctcgaggcggctcgagtccagaatcagccttgcttgtcaactccagcatcaggaagacaaatatcaaatgtgagagatggaaaagctgaactgcataactccgtcttaactatctggatgctgaagagaggaaagggaggtgtggccgctatcctaatggcgctcactccacttccaaagctgggcagccattctcgttggaactcatacatgcctgccggagtgaaaactaagaagtgaacagtctccatggtcacaagccttgtcccttggtctttacctcccctcccacagtcccatcttggaagtcatgtgatgtttgtctgtgttgtttactttcctcctggccacacacacacacacacacacacacacgtgcgtgcgcatatcagagcacacatacatcctacaaactggcttccttctctgtcttcacatacatcttactacagaagaccggagcctgtggggacttaagtggccatacctaagaaagtgcagacagacagggtgcactgcagtagaaagctgaggtgaggtgccagggagagggggagagagggtaacccttggtttgtcctccatatcccccagagttccagacctgctcagacaggaagtaaagccagaggtaccagggtgaggagctgtgtgcctctccaaagaggtggtggcaaggagactgtgacctcccggaatggggaggaactgccactagggaaacacatggaaaccaaaac

SEQ ID NO: 2894 - DNA, 667 bp, Mus musculus
  misc_feature (666)..(666): n is a, c, g, or t
ggctcgagccggcctaataacaatccaggggggtcactgcgacgttcacagaggaacactgccggggcccaaccacaagacgactcaataggaggaagaagctgcagttcatcatctgctgtcatagttccacaaccagaggatccagacagagccaatacttcagaaaggcagaaaacggggcaggtgcctaaaaaagacaattctcgaggagtgaaacgcagtgctagtccagactacaacaggaccaattctcctagctctgcgaaaaagcccagagcatttcagcatattgagtctttctcagaaaccaataagccacatagtaagtcaaagaagagacatttagaccaggagcaacaactgaaatctgcacaattgccgtcaacaagcaaggctcacaccagaaagagtgtggctgctggtagttcacggaatcagaaaagaaagaggacagagagttcttgtgttaaaagtggttctgggtccgaatcaactggtgccgaagagagatctgcaaaacccatcaagctggcttcaaaatcagccacctcagccaaagctgggtgtagcaccatcaccgattcttcttctgctgcctctacttcctcatcatcttcagctatagcctcggcctcttctactgtaccagcaggtgccagggtng

SEQ ID NO: 2895 - DNA, 703 bp, Mus musculus
gcgcggctcgagctcgagccgcgggacgaatgccaccactgcccaactaagattccattaaaaaaaaaaaaagttcaagataattaagagttgccagctcgttaaagctaagtagaagcagtctcaggcctgctgcttgaggctgttctgggctgggacctgaaatctgcccccaacagtgtccaagtgcacatgactttgagccatctccagagaaggaagtgaaaattggtggctccccagtcgatggggacacagtctctcttggtctaggtaacacatggtgacacatagcattgaactctccactctgagggtgggtttccctccccctgcctcttctgggtgggtcaccccataggacagccacaggacagtcactagcacctactgggaaacctcttggtgggaacatgaagaaagagccttggggagattcctggctttccattagggctgaaagtacaaccggttctgggttgggcttggcctcgtgtttataaaactagctactattcttcaggtaaaataccgatgttgtggaaaagccaaccccgttggttgcccgtgagtagggggtggggtcgggaatcctggatagtgttctatccatggaaagtggtggaataggaattaagggtgttcccccccccccaaattttttcctcagacccagccatttctatgacttataacttccggt

SEQ ID NO: 2896 - DNA, 776 bp, Mus musculus
caccgcggtggcggcgcggctcgagattctgtggcagtctatctagagaccttgcagggttgtcttcaaatgtctggtttctctcctctggtctgtgacgagcgagcgtctactgccgggagcacagctggggcgtaggtttcaccaacctgctcagcggccaagctctccgctgttactgccacctgctatgcttctgcatagattataacagattgtgtcgggtaaaagcatcttcaatcttgaggtaaattagaggggacccagctttcttttacaatgtggatctacctcagttaaacagtgggtgctattaactaagtctgtcaaattaaatggaaagtaaccaaacagtgggacataactaactccacgtgaaacttgaagacatcatttccgtttctttaataatactttttatttattttgtgccttttatgttaaccctaatgcgttttttaaaattcagaatagtcatttttctcttgcgtgtggggagcccaactgaccatacaagcagccatctaactgctagagtatactgggatcctaacctaccctcttgggaaacggagggggaaaatgtgtccaagagcaaatttcacacatcacataccccagctcttacatgcttaccttcattagctttcgcttcatttctgtgccatctgaaggggcaaccccaaaatgacactcgagtgcttgtctctgctttttcagctgtgcggtctctcttctctggcatgttttctataagactttctttcataaacagc

SEQ ID NO: 2897 - DNA, 569 bp, Mus musculus
  misc_feature (476)..(476): n is a, c, g, or t
gctcgagtctaattcaaagattacaacacctgtcacattctaaatgtgttcaggcttctgaagggaaagggacactggatccagaagctatggagccagcagttgatcttgtattcctgattaacttccttgtaaacttgaacttgagaccttgattgaaccgacaggtccacagtaggaacaggaagcaggcagagctctgagcatgacctgaaggaagcaggctggcactagcagttgccttgtctggagatgctgctgccttcaagtagcacagtctggcagtggctaaatctgtgttcccattgaaattgagcaattttagggtgttatactctgaagcagttgaattgggagaatgaagatagagtaatttccctgtccaggatcaaaagaagcctagaaagaagcagtgatctacctctgccaataaccctgttggaagcaacgcagcagaacaccacggtactttttantgcttaattccacgtggctgactaggtcaaggttgcttggtgttttttttttttttttggtttctgagccaaaagcgggttttttgggttttt

SEQ ID NO: 2898 - DNA, 677 bp, Mus musculus
  misc_feature (613)..(613): n is a, c, g, or t
tgcacccaagctttgctaaaggtgggctgttctgcagtcttttttaaatgctgaagctgagagcttgttgcagtcctgtgcaacaaggagaaaggcgaacacctttctttatgaatggaccaaatgattgatgcacaattttcttcccagggaaagcttgtcaggttgtgggcattagtgggctagttggtgttaagcccgatccacgtaaaattccatttgataaatcccaggagtttccagagtttgtgtgtgtgtgtgtttgtttgcttgtttccacctccagctggatattgtgcttgaatttgtgagtcttctgacaagacacatttctctttaaaatagagtgatttttaaattgtcttgtgaaatcaacccaggttaccttgagccgtttacttacatcaagtctactcttgccagtgagtgccaacaaccagtttggcaaagtgaaatcttagcatgtttggatggtaggagcactaaccttacagtgttgaggagacaaagaaagctaccaagatttgtcacatatctttttaattgtccataccatacctactatgactgtgttagacacaccaccgaatagatggtgttcttagcatcactnatcatagtttcacatcatttccttgccatggttcttctagggagcactggggagtcagcaagaa

SEQ ID NO: 2899 - DNA, 741 bp, Mus musculus
cggggcggccgcggctcgaggaacacatcgcagtgtacagacaagaagaagatggcatagatgtctggactctcttaaatggaaacaaagatgacttcctcatctatgacagatgtggccgtcttgtgtatcaccttggtttgccttactccttcctcacattcccatatgttgaagaagccattaagatcgcttactgtgaggagaggtgcggaaactgcaatctcacgagtcttgaagatgaagacttctgtaaaaatgtgacctcagctactgccaataaaactgcggagccctcagaggctcatagccaccacaaacaccacaacaaacatgggcaggagcatcttggcagcagtaagccttcagagaatcagcaaccaggccatcagagacgactctgcctccttcaggcttgcaccaccaccacaggcataggggccagcacaggcagggtcacttagagagctgagacaccacagcaagtgaaggcttgcacctttcacttgcccagaggaagctctgacgaagggggtgcatcaaccagctcctgtgtaagttgtctaaggagtccgaggcagccccagcagctgctgctgtcactgccgcacctcatattgagaagtcagggtctgcaattgcttgacagtgtgcggaaaacctcccatccttatgtagctgacagggcttttcgcggaggagacagtcactgaatcctgtcagtggtaggtcacctccagt

SEQ ID NO: 2900 - DNA, 768 bp, Mus musculus
gcggggcggcgggtcgaggttttagccagtaatttaatgatgactgttcattaatttttaagaccttttaatggacaatttattatataactaggaaaattctgcaacattaatccaaagttgtattgggataccctagatatccatagaagagatttgatggacaaaagtatttatgacataaagaatgtgttctctgttggtatgaattaaatagtttctgttcttttaacttgaataaaaaattgttagatttattactaccacttagctccacaactagctgttcattcttttatgttgcaaccatgtcagacttaccttttaaaatattactatcagggctgtaaagttaatactaccatttcaagaggatctgcctttgtgtctcagcagcacatcagttacctcacaacatcctgtaaatctgcctcctggggattcagtgacctttcctggttcccacagggtacctgaactcatgtgtatagatgcacacagacacacacataatttttaaaataaagatatactggacatggtcacacatacctttaatctcagcactcaggagactgaggctgtgagttccaggccagccgaagatacattatgagaccacatctcaaaaaatatttgtaaaacattgatgaggcaggtaagatagttgagtagatataaagcacttgccacaagcctggcaacctgagttcagttcctgtgacccacatggtagatgtcaagattgctcctgcaaatgtctctgac

SEQ ID NO: 2901 - DNA, 811 bp, Mus musculus
gcggggcggcgggctcgaggttcatgcatagaaagttaaccctattaatttcagtatcaaacatgttacagtcaaagacaaggaagaccaaaccacacactgtaaaagtccactgctctgtagtttatgccaagaccacaatgactctttaccccaagaaagtctcttgacttaagttctgagactccaaagactgcacataagttttagacatacaagtgtctatctcaaagcagaagcagagaaaacagaaagaagctacaacatggctctagtgttgcaatgttttctataagcacactgaccttatggggccatgttatttttatatgataaacgtcttccatagaacttactatagtcaaataacataaaaaaactgacctatacaagtgttaagaacctaatatgacagacatgaaatatgtaactaggaaaaactgttaacattaaacatcatatttatgcaaattaaatgcccttaaaattttgccatttgtctttcattttaaaggttatttgccctcaattatataatttcagtgttataaagtttagcttaaactcctttgcaataatttatttgacagaactccattctaaaaccatgcaatgtaatgagaacagagatctttcctttttaaatgaaaacattagcatgttaataccccgtatgaataaatgcctgacatttcaacaatttgtggaactatgtggtatgttgctgaacatacatacacctccgaaatgccagttctgcattctacacatatgctttctggcagcgagttattgccagatttaaccggag

SEQ ID NO: 2902 - DNA, 770 bp, Mus musculus
gcggggcggcgggctcgagaatatagcatagtctgaggtttggttttgtttttaaaatctttctctgtttctgtttagtgcctgagctctctccctgaagtgtgtgtttattttgtttttaatggcctaagatagaaaagcctatgaacatagatctccttgcattacagtgacacttgccaagtcctttatggctaagcctccagctacaataatcagattatttcagagtgcctcatcgaaataccattgctctttggcaagctgccacagacacctaccagacattttcttggtttgattgttctcaagtatattcatgcccatgcagataaggggagtgtcatcccagcacgctgtgaggatcacttggccagactactatctgcaagaaggctcaacatgccactgtgttctggagactatctaacagacacacctttcctccagaaactgggctgttcacttttgctttagtgtggctgtatgttcaatgaagtcttatgttagtttccagttttattatgactggacaggagttgggtgtagggcaaatgtttttcaggggcccttgattctgatgggaagaaaagagacaaacctgtctgtgtctctgtctcctgaccagtccatgtggagcaaccctgagagagagagagcaatgtgattacaataagaacttggggttaagttctatatcatttgaggagaacatgggagaaaactcatctatgagagaggagagctgtccatacgaatgtgtctaaatt

SEQ ID NO: 2903 - DNA, 702 bp, Mus musculus
cgcggggcggcgggctcgagccttagccctacacaaatataattatactattatataaatcaaaacatttatcctactaaaagtatggagaaagaaattcgtacatctaggagctatagaactagtaccgcaagggaaagatgaaagactaattaaaagtaagaacaagcaaagattaaaccttgtaccttttgcataatgaactaactagaaaacttctaactaaaagaattacagctagaaaccccgaaaccaaacgagctacctaaaaacaattttatgaatcaactcgtctatgtggcaaaatagtgagaagatttttaggtagaggtgaaaagcctaacgagcttggtgatagctggttacccaaaaaatgaatttaagttcaattttaaacttgctaaaaaaacaacaaaatcaaaaagtaagtttagattatagccaaaagagggacagctcttctggaacggaaaaaacctttaatagtgaataattaacaaaacagcttttaaccatgtaggcctaaaagcagccaccaataaagaaagcgttcaagctcaacataaaatttcaattaattccataatttacaccaacttcctaaacttaaaatgggttaatctataactttatagatgcaacactgttagtatgagtaacaagaattccaattctgcaggatacgcgtataacaactcggat

SEQ ID NO: 2904 - DNA, 787 bp, Mus musculus
cggcgcggctcgaggtgaaccgtccacatcatctgtaaagcgacagctttgctaagatagaagactgctgagagcagaaggaaatgtagtgaagggtggagcttcggaattaaatgacagggtggtttacgctaaaagccatttctgttcattccttaatctgtgtatttcatttattttgcacatttgcatatgtgcttgtcttacagatatgcatatacttgaaagaatctataacgttgtagcagcagagcccagtcctgctcggttactcagtgctgatacaattggaggaattgggtaacgagcagccttccagcacgtgacgcttccgacgtggccgttagcgtaatcagagttacactattactcttgtccagtgctttactttctgcctcttagatgcatctagtaatccacacacgaaatattctttgttatatatgatgtttattaaaacttgtggtgtgcttattagaaagaatttgtcagatttttgaatatgatattatttaggaaatctgtaaataaccatgcatatattgctttttacattgttttcttaaattgtgtctagatatcttttcattaattttaaattaagtaaactaaataaataaaaataaacttttttaaagatgtgtggtttaggatcggtttaagaaagtgagtctaccaaatggccagttaaagagcaagttagggggtacgccagtttcagggatgtccagatgagaaaccttaggttttaagattactcacccttacagttcttataagaagagat

SEQ ID NO: 2905 - DNA, 734 bp, Mus musculus
gaaatggatctcattctctcaggagctgtttccttcctgacaggcctaagagaatgagcgactgcctcgctgctgtcctctcgaggggctgaggaactgttggagccagcactgtgacttggaatgcaatctgcgagagattcagtcgcagaggcaaagctttacccagaactctgagatgccacagcactacagacagaacaacttgtagaagatactctagaggactggattcagtggaagatgagaaccacccaactgaaagtcaagaagcaggttggaggcagaaatgacctcatcagaaatatgttcattgggctggaatcaaaagttgatgttgaaaccatgagtaggaaaacaaagctacagtcaaaaaaaaaaaaaaataaacaaaaagaatcaaacgataggctgacaagatcagacgtctatcctcaaggaagttggaaagctccgtagacttttcaaatgactctgtgtgatattgcgtcataaggagaatagtcctaaagagcatcagataaatttcactaggctaaagggtcctactgccagggccttgtagccagaactaatgcaagatggaaagatgcaaaaagaaatggaagactggtggcagcaccacaagaaaaggggtcacagtgtgcctgtcaattgacatgtgctgtttggatgccaaaaatcgcgaactcttgacgtgtgttctcacacttaattcactaatctaacaatgg

SEQ ID NO: 2906 - DNA, 697 bp, Mus musculus
ataaatagagctccaaaaaaaaaaaagggaacaaaaaagatatttatgcttggttattaacagaaggcagcagactttcataaaactactatcggaagtttcccattagatgtttaaagagctatccttgggtatgtggggaaagaagaaagctggtcataattctgattggagtataagtgagagagatacggtactggtttggagagcagctccttttctggcgtgtgggcttcataccgtcccaaactactgtagacttttattaatagcttcagctgagaattgggtaacattgccgtgtttgactcacaacagattcttgaaaactatctttaattacgggtaggacaaaaagggacattctgggttattttagggcactgggcttgggaacactggtatttgcagaagaaagaagacgggcaatctgggggacagggaaggggacctggggaagcactggccttctttacgggaaagacacaccaattagatgagatcatcccaaagggcacggggaccacagagtgtgagtccttagttgacgagtcaggtgagctcgggtgagctgggagaagccagcccaccagaagagcaggcacggcagggctgggacaagcagggacgacaattccagctggacactggtcccagtatttggctccctcttattataccggtgaggcagtatcac

SEQ ID NO: 2907 - DNA, 758 bp, Mus musculus
ggcgcacgccggtaggatctgcctcccgagtgctgggattaaaggcgtgcgccaccacgcccggctctgttcatccttttaaaggtagatcttttataacatcctttgccaccttgagatgatttataggtaatataatctacatttgagtttattcagacttaatttagtgccctacttgtgttataatggaaacttagaaggtcagaactctgtaatggacataaactgttaagtactcaggcatgactacgctatcagctacgaaacatgttaactctcactaggaatagctttggcttaagagtccagcaggggcaacttcctgagatgaatgaagtacaggaaaatgaaagattagagggatgtgtgacggaatacagtattagggttcaccatagcagactctgcgctttatctgtctatggtgaaggatagggcgcaatcactttaattgtaatgatagataaataagacaggacaaactacagtttgtctcagaggaatccaaggattctttttcagacaagttgtaggtcccgcatacatgtccaccaggacattagacagtcgtaaagatgcagaacgaacagtttgtgtgtgggactgacccaccacacacagcagggcacttgttctgcctcaggctgcatctactcagtgacgttaataaactttagatacaaaccaacaacacaattctccagtatactacagtgggaatcactgatctagtttaccggagcactcttggatta

SEQ ID NO: 2908 - DNA, 645 bp, Mus musculus; identical to SEQ ID NO: 2043

SEQ ID NO: 2909 - DNA, 607 bp, Mus musculus
ttttggagataatgattctttatttgaaagatgtctaaaatgtatgtatattttataaatatatattatatatattatagggatatatataatatatagacgatatatatctatctaaaccatgggtgcattttactgtttgtgtcttcactttgggaggtagtatactcataagttgatgagtctgacgagtgttgtgctgtttgcttttacagtataatatatagttccaagtgtttaaatactgtatatactatattcattataggctagcatgcttgttttaaagactgtcattctagtttattaaaatctgaatgtaagaaaacctggctattcaaatgtgaattgaaaaattccattctcagaactgaactgtttccattgaacattcaagctttttgacaaaatgtgtcatcgagaaggcaatagctagaaagtgagaggtgcctttaaaaaaaaaacctacaaacgcagccttacagtgagggtgaagactgaatctgtgtcggggtggggggaagagagagtgtgagagatcgtgtgtgtgtgtgtgtgtgtgtgtgtgtgtgtgtgtgtgtgtgtgtgtgtgtgtgtgcacaccagt

SEQ ID NO: 2910 - DNA, 650 bp, Mus musculus
tcaccgcggtggcggcgcggctcgatgaaagcgggaaggcgagtgcctgtggtcaggtagaggagctagtggctattgagtcaaaatatacatctcatgtgagatgatataagctacaccctgaacttagagacattaaaatgtccacaatgatcagtttcctgtaaaaaaaaaaaatggtatttgtgaatttaattttttttttaaaagaaaacagtgtatttgtgcctatgttctgtttcatactagggttaggactagcctttaaactttgaatagcctcaagaagcattccttttattaccagcaataaattagaatacatatttatgaacttaaaaaggaagtattttaagaaaagtactatttttaaaagctagtataattctatagttattgatgaaaactgagttttgtttggtggggaagagaatgtttcttagaatacaatagttgccaaaaatccaaaagcatttctactctaagaatatagaaggagaaaactgttgttttaaactttcctcaccaaccataagcagtataactccttgtgtatcagaactattttaacataacatacattttttcaaataactaacaacctgaagtgagaccagtgcattaattttaattagtgaagaagttgagta

SEQ ID NO: 2911 - DNA, 632 bp, Mus musculus
tcacaaatatattatactattatataaatcaaacatttatcctactaaaagtattggagaaagaaattcgtacatctaggagctatagaactagtaccgcaagggaaagatgaaagactaattaaaagtaagaacaagcaaagattaaaccttgtaccttttgcataatgaactaactagaaaacttctaactaaaagaattacagctagaaaccccgaaaccaaacgagctacctaaaaacaattttatgaatcaactcgtctatgtggcaaaatagtgagaagatttttaggtagaggtgaaaagcctaacgagcttggtgatagctggttacccaaaaaatgaatttaagttcaattttaaacttgctaaaaaaacaacaaaatcaaaaagtaagtttagattatagccaaaagagggacagctcttctggaacggaaaaaacctttaatagtgaataattaacaaaacagcttttaaccattgtaggcctaaaagcagccaccaataaagaaagcgttcaagctcaacataaaatttcaattaattccataatttacaccaacttcctaaacttaaaatagggttaatctataactttatagatgcaacactgttagtatgagtaaca

SEQ ID NO: 2912 - DNA, 604 bp, Mus musculus
agcgaggcgatactccagcagagccgccctttgagggtagaggctggaagagcagctcgctgatggtgaaagtgaccagtcgccctgagtccgagtagggcgtgtcctgtgtaagcgtctaacatccatggcaagaaaggccatgtcttccactttggctctgtgggcccctcagacttgcccaggctggagtggctgtcatggctgtagactgtcagcgtcggtcttttgctactcgtggtcgctgctttctattgcatgagacgcaaaatgggcgccctggcatgctgtccggcgagcagagaaaggggcgccgccagccagggaaccgtgagttgagccactctgggtcagagcggccagaacacacgggccttctcatgggtgggccctccggaggaggccgaggtggcagtggaggctttggagatgagtgttgaggctgacgacctcccagaggcgatctctggctctggaactttgggcttcactcggaggaccggctctgagcacgcctccgcctcagcgcacgcctctggctccttccttctccagcctcgggctcccttccttcctctgcctgctgggcagggacccccagtgg

SEQ ID NO: 2913 - DNA, 648 bp, Mus musculus
ttcattcctatctgggaaatgtccagtgtgtttttctgtgtcttgtctccggaatgggttctggaccatgcagccttgcattcctaccctgcaccaacagggttgatacatcatctgattgtctgtcactgagccttgttctccttgtggacacagctcctggtagcctggttcagaggcccaaagaaagggcaccacagataccaactagtttatgacataagttggtgactatttttaatcttgctatgtccacagaaatgagaaacattgccttttagagaatctgaaattcagtcacatttcttttcctttacttattgagatacttaacagtggtgcttgttaacgccttgagcatgctagactcttggctgcatccccagtctcagcgtggttaaaatctctgcttgctgtgttataagaagacagtagaatggattttgtgtgtgtgtgggtgtgtattggtgtgcctaacagggtaaaggcatgaataatttcttttctccctttttttaaagagtattttgttttagatgagtaagagttgcttacaagagcaattgtgagccttgcagttgctgagaactgaacctgggatctacaggagttaactgtagctttcaacctgagtcatctctccagctg

SEQ ID NO: 2914 - DNA, 713 bp, Mus musculus
tctgcctgctggatacagaatagctgaattatgaatggggctgaaggaataactgtgatttttcaaagaggtcagcatcattgaagtgaaaccttcgctggtcagataaaactgaaaattaaaaaatgattaaaaaagagattggtaccattgaagtgaaatcttctgagaagtatttccttgggagtcagctgaatctatggtccagaggagccaatgctggtagccaagcttggcaatgggtatgtttctgacctggacctggttttgaagacatgagagatgcaagattatgggaccctggagagaagataaggactgataacatatcagggtcagggtacttgagaagagacaagaagaggctactggaaacatgaagcctcagttgcagagaaaaccacaggatattggagagtctaggaccatggaccatccaccaaagacagcagcagatgtgaaatcaagccaacttaagtttatgagactagctgtgtgttctgcagatggcagaaccagagaagcaaactgtcccaatttctttggaatccagatgattatgagttccagatgccagacattaagctatactgctaaattttaggtctttctttgatttgtgtgtttccatatcaaaatattttctttctggaatagtaaatatttaactcaggcttttaattgggatcttacagttaagagattttgaattt

SEQ ID NO: 2915 - DNA, 750 bp, Mus musculus
gcggtggcggcgcggctcgagtcccaagccagaagatgttatcacttctaagttgccagaggagggtccccccagccaccacaccagagatgccctggcagccactctcagcattctttcaccacggctgtggcctgctgccctgctgagacaacatggctgctgcagggacaagggcttctgtcccgtgggaagagacagcctttgatcttgcccagaccttgttagatagcacactcaggcttctggaactgaggctggaaggaggcagtggtggagggttgaaggtggggggtggggctagcctgcagcctgaaagggcagagggatatgggagaatgaggtagaaattgagagagaaaatccaagttccacctcctggctgggggtgtggcatgttgaggctcaggcagagaggaaggagcctgtccaggtgtcacacaggagtgacaagaacctgagctttgtcccagccaggccctatctgtagattcattccatgaggcttcccttctctctgctgtcctcagagactcagaagaggccccacacacagacaccacaccagggtgagagtcagaccaaggggtggcacagacagcctgctgttatggaggcttccttagtggcaggtgggcattgagaaactgcccttacataagagatccagctcaagggcagctctcctcctttgggacatccctttgaagtgagacacctcctgtctgtctattgtaccccccccccccg

SEQ ID NO: 2916 - DNA, 615 bp, Mus musculus
ttggatttggtttaagtggtgcattgtaccgagctctgggaggattccagcctcatcttagacagctctttctcctcccccaactccctcccatgcctccaccccacccccactgttcggctttccctttcctcttctggccttccctggcttccttttccttctccctcttccctcagcttgcttgctggctggcctgcctgcctgtctgcctgtgtgataatgaattctctgcatggctgcatgatcccactgttagttggcaaggtcaggcttagctcattgactacagaagaccaaaatcctgtttctcatgcccagtggtgttagccctgggttgcactgtcctcaagcttacactaggtcagagcagcaggcctgtcaaactgacaaaactagtagggtttctggcaggttcaacacctctccattctgtggaggggcttggagaagaggcagtgaaggagaccgctgctttgaattcagtccagtgtgaccgatcggttgaggtgctattggcagcctgtcggggtcggcctggagctactgttactgggaacttatccttggactttgactaaagttgaacagagtatgaaactgttctagaaatct

SEQ ID NO: 2917 - DNA, 705 bp, Mus musculus
gcggggcggcgcggtcgagcttgccctgaggcaagccaagtccatagcattcaccatgatcatatgcccctcgggatcctgagagaagagagaggcttgtactgaggggtcttcccattgtgggggtcgcagggagggaaaagccaggaaggcagtggtcattctcccaaagtccacccatcgtaaggaggtgacagatcggagtcagcagattagtaattcaaatgggtaatggaaaagattcctttaagcttcatttttcagagaccatcactttagaaaatcagagaaatcctgttttgatacttcttagttaaaataatatgttaccgtttatctggtacttcattttcttgactaaaattacttttcactttaagcttgaataaaaattttcattcataactgtatataattaagtggcaactcctctttacctcagtgcagttaagaccatcttttgattgatataccctgaagccattaatccatacacctcagtctacagtaacaatccctaacaccatgtgggcacagaactccacagctgtttacagatgtggttacagtgtaccacgtggcatgtgcatgatgctccctgagggctgtacccatcagggcagttttgtatccagctgcacctagacccgcctgttcactgcttctgaagtacatttaaaaacactgggaggtaagagcgtgccc

SEQ ID NO: 2918 - DNA, 830 bp, Mus musculus
agcacacagagaggccaagctctcttaagaagcccaattgtgtgtcagacttgacagaggtatagcctgggccctctgtaccttctgttgggaccctgctttcagggtagcttggccattggccaccaagtagcattctcagtgtcttaggtccctaacaaggaaccggtctgttgagacatctgagcaggtgaccttgtggaccttccagacttagaaccagcccatggagtcctgatgagaaagaagtgtgcagtgagccctcctggggagccctgcacgcctgtgacaatgtcacagaacgccaaaggcccatgtggaagactggcgttctcttcaggctctagaacctgataccttgtaccaaagatagagaagagcatggggcaagccttcgccatcctagctctaggactgactgggctcagcatacccggttaactgtgactgcattagaggtgtgttctccattgtatcctctgcaacataatgacggctgaagcacatagaactgttttcctacgtctcctgctaatggaggagcgtgcactaggtgtagcacaaagcagacattggggcttgatgattagcgtcagcctaaggagaggtacaccccatctcagggtgtgacttcagccaacttctgaacccatgtacaggttcatagggacagacaactctgccttttcttgaagcgctccatccactgaacgagcaagcagctttgaatctcttgggaaagagctttaagagtaaggcggggagaaaaccaagcttccctcctccgtcatcccccggactaagggaaaaccaaaacaaaagctaactat

SEQ ID NO: 2919 - DNA, 841 bp, Mus musculus
  misc_feature (71)..(71): n is a, c, g, or t
  misc_feature (293)..(293): n is a, c, g, or t
  misc_feature (582)..(582): n is a, c, g, or t
aatcatatagggcgaatggattcacgcggggcggcgcggctcgagctctacaagagtgaaatggggctaantgttactttgttgtaggccagtgttcccacctagtgaggtggaatagttgacagataattccaggcatggcctgatgcctgagagagtcaacaaacacaataggtgtcccagagactcagggaggagaattatcttgaaatgctgcaagaaggttcctattcttgagacgaaactaaaaatagcatctgaactcctacgagaacacaaactaaccctgagtngccagcaaaacccattcacgtccacccagtccacccacggtggaacccattccaggttctccttgagacctccttggagtgtgactcagcttttcaggagcagaacaaaagggagatgttgaaaaggaatttgggactcagtcccagagaacctccatccctatgttcctcccatccagtctctttcccaaaagggtttaaagaaatacaaatatgggatgctaccaaaggttgaagaagaaagcagtgagtttgtctttctccaggctgacttccaacataggggttntgtgttgttttagttgtttgatgtttttggtttggttggttgtttgtgctgcatttttcttttcctgtggtgctgagggtgaaacccaagactcatgcacatttaggcagagatttctagcgagtgtcatgccctcagacctgggctagagtccccctcccctcatctcttctgcgtacattctgaacagtcttctcacgggtgtctgtgcccacctggttttctctctggtgagtagaaattttatttagtgatatgt

SEQ ID NO: 2920 - DNA, 795 bp, Mus musculus
  misc_feature (544)..(544): n is a, c, g, or t
gtggcggcgcggtcgagttcagacctgaaatcttaggcccaggtaaccaaggatactgggttcaggaggaagtgttcaggagaacttcagaaatggacctcatcaacaaggaagcccaaaaaaggtggactagaagagagcaagctgacttctataggacagtgtcttcctttggtgttgtgtatgaccaagaaaagaaagcctttgactggacacagttccgcatcatttctcgtttggacaagaagtcagatgagagcctggagcactatttttatagctttgtagccatgtgtcggaatgtgtgtcgtctccccgcatggaaagatgatggtccccctgatgccagcatctatgttgaacccatcactgaggagcgggcagcaaagactctataccgtattgaactgctgaggaaagtccgtgagcaggtgctcatgtgtcctcaactacatgagcgcctccagctttgcaggcccagcctctacctcccagtctggtgggagtgtgggaaacatgatcgagacctgctcattggcaccgncaaacatgggctcaagcgcactgactattacatcatgaatgacccccagctatccttcctagatgcctatagaaactatgcccaagacaaaagaactgacacccaggcacctggaagtctctgttgcctttaccagagcaattctaaagtatatgagtctcttacttacaccccaatgagtaggacttcagagtctcttgaaagtgagccagagaatctgatgagaatggaaagcagggatgatcatctct

SEQ ID NO: 2921 - DNA, 703 bp, Mus musculus
gcggggcggcgggctcgagggacaacaaagtgaaaagaaaaaaagaaaagaaaagaaaacgaattctctctgtcaacaaagttgtgaggtgcgtgtaaaggctcaggacagaaggacaggctttttccttgggtaaggaaaaaggacaggttgaaaccttgagtaagcaccacctgtttaccgcccttgacaagatgtcttcagggaaatgcaggtggcctctgagagcaactttgcctttactctgctttacttgctgaaaaattttaatcctatgagcaggaagggcaaaccaggttctggtctcatgctttccctcccagtcttccccgaagctttccctgtcttcccgtcctgcctcacaatgacctcaagttcatcttcaggatgctgatatgagggctaccttccaatgaccagaggcgtacatgactgagtagtcccacccctactgagtagtgggtggtccagcccatcactgactttgctccgttctgcaagatgatccaataggctattgttaatctgtcaatcatctgttcattggtgagagtgcagacactttggcggtggaggggtggagggtggagtctgtcttttaaaaaaaattgttcttcctggaattcaagatgattcaagaggaaaagttaaggacattgatttatctctctgctccaaaatccagacaccaaatgaaacagag

SEQ ID NO: 2922 - DNA, 707 bp, Mus musculus
gcggcgcggctcgatgtctgattcttactcaaaattagactatagataggagttgggtatcagttggtggcagtatttaagaattcacaaatgagagccgtgcatgagtgtgggtacagactgagtcctaaacaagtttgccattaagcattagttaaaatgtcagaatccctgtttaatctcctggggtttcctcaccccaggcctaaaacaggctgtgagaagagacgtgctttgaggacccggaaggcactgctttgtaagaatgtcaagattaggcttttgaaaccttagattttcaagtcaaggactttgggcctcaaatacaaaacgacacatttgtgacctaaatactgtgcctcacagatccatacagcccgtggctttctccgactgaacagctcactgaactcagcttacacctgagtaagggcggtggggaggtggcagatgcgcgggtttaccttgatgacctaagagtcacctccttcagggaaggaaactgtcattttaaacattgtttaacattttcacaaggcgtttagaaagcactcctgattttattcctagggaatttttaggattacaaattgatgtcttgtactcagaatatggccgacacactcatcattgggtttttcccttcttcccttagagtgctagacagcttgcttctgcttcactgtccacttggggctgcttggttt

SEQ ID NO: 2923 - DNA, 342 bp, Mus musculus
gccgtgtgagtggaaaaagaaaacctccgccctcacccgagtgccaaggcaagtccggctgttcgttcggatggtgaaaagctaagtgtttatctggcgactctgataagtgtggatcaaaatgtacaaaccgcattccattcactttttcctctgtggaaaagggttatcatttcttgtagtttaaagatgagaaggcagtctccaggaatgacataccaagtacagtacacacacacacacacacacacacacacacacacacacacagagagtcaggggtgtgatgttcagggcagatctcctcctaagagtttagatgtgtgcagtcacgcccctctc

SEQ ID NO: 2924 - DNA, 819 bp, Mus musculus
tatctacccactccggactctgcccccttcactgtaacaggccagtctccctggcctcagttttcccatctctaaagggagaggttggaaccaagagacctacatgactgaggagtccccgtgtctatagagtggcatctctgggttcatggcagacagggctggatgtgtcaggaagtggtttctgtgctggtgggatgtgcggtgggactaggggaggtaggcagggcagggctaggtgacaggcttgtgactcagcttccttttttctccacagggtcctgaagacactataagccccccaaacctgatagcttggtcagaccagccacccagtccctacaccccgcttcttgaggactctctcagcggacagcccaccagtgccatggcctgagcccccagatgtcacacctgtccgcacgcacggcacatggatgcccacgcatgtgcaaaaacaactcagggaccagggacagacctgctgccaagtgagcctgatgggccacaggtgtgctcttctaaatggcctgtgagccaggctgtgggaactctagctgctgtcagcccctcctgtaggagctggccctgcccaggctcctgacttccctcaggaagtctttctgtctttctccatcagtctgaaagccttagttcccacagaggacggatctgtcactcctaggggctgggcatatgtcggctctagtgccaaggccaggcaagcagtccaggtcctgaccagtttgacacaactctggagctgtatctggcgctttttctatcgtctctgctatgtcactgaattaaccactgtac

SEQ ID NO: 2925 - DNA, 536 bp, Mus musculus
ctatagggcgaatgtatctcacgcggggcggcgcggctcgaggctttggagaagcagttcaggaggtaggaacccagccctttccccaggctggggggagggggaggggggaggttgtgcatggtagtgtcaggtgtgtgtgtgcatgtgcatgaatgtgcacaactcctgaggaaaggggctgcagagggctgcctgccttctgcacgttgcctgcctcctgctcctcctaacctgccaagaatatagcctgtgaagtgaagccttgggataagccagccactggggtgtgcaggcaagcagctgcccacccttgtgcccttgtctccttggaagcatggtcccttccactctagccccactcccagcctctctgggctgcctaggtttccctgaccaactcatgattcctggcatctgggcctgagtctttactctaaccccacagctgaggtggcctggatagctagctatctgccctaacaggtaaggacagagacctgggagctgggcctccccctgactctgtgactccc

SEQ ID NO: 2926 - DNA, 805 bp, Mus musculus
  misc_feature (307)..(307): n is a, c, g, or t
cactatagggcgaatggagctcacgcggggcggcgcggtcgagggacacaatatgcagaatagttttttttgttacacagtgatgtattttctttaaggctgcaactttagttactttatttcaggcatctaagagaaacataacttaaaaacaaggcactattgagagcaaaaatggactaatagaagaatggggtaaagaaaaggtattagataatctttagaaaaataatttctgaagtggaggacacatgtatgtgtgggtaaggtgcacacatgtacgctcattcttgtggagccagagatngtccttgagtgtcttcctttctcgctctccatttgctttttaagacagcaaatctgagtctggagttgccgcagtaagcttccccagctggccactgtgctctggggtcccacttctgcctcctttcccagaagggttgggattacagattacagacacttggagctggagttggctttttagaggggtgctagggatttgaactcagatcttcatgatcgtgtgtcaaacacttgactgagacatcttcccagctccaagttaatgtgggtgaattgcttgctgattatggtttctggagtgccgttttcttttaagcatgtttatgagcatgtttgattccttctcccggaacaccttcatcttttttacttaaagcaaaaatatctttctggcttaataacatcacttaaagtttcttagttcagcagaacatttcatactgggtcaatcaactttatgctatccgaacacttaaattcttccttcatttgcctc

SEQ ID NO: 2927 - DNA, 663 bp, Mus musculus
cacgcggtggcggcgcggctcgagaggagccaagagttctacttcttgatccaaaggctgacagaaggctggctcctacatggctaggaggagggcctcacagtgacacacctactccaacaaggccatacctccccatctgggccattccttggaccaagcactaatgcaattaattacagggaaaaactttctttaccccctcctatatgtgtttttaaggttaagcctaaaacaagtaactaagaaagaagcaaagtttgttcagctcagctatccttaataattacggtcctcaaactcatcagagacctgctcaagtggcattttatgtgcttaatggaaaaaagcctgctgtggcagagactccagctcctagcactcaccctaaggtctctaaagaagattagaaggggcaccaacgactccacctgaattgtggtaatgctaaccactgggcataactgccccaatgcctcatccgctgccaggaccctgcctaaaccgtggacaagcaggacactggagagttgattgccctactttgccgagacaaagcgaggtcaatttctcaaggtcctcctccacaggaagaaggcctctctgatttgccaggcctggcagctgaagatcgacgcagcctgcgacgtgtgcccccaacga

SEQ ID NO: 2928 - DNA, 839 bp, Mus musculus
gcggtggcggcgcggctcgagaagaatttgcaacaatatgggggaaatttttcattgtcgggtttgaattatactggattttatctgtctagtcttacttgtctttattttaatgctgtctggaagggaccttggtacccaaataaagcaggttaacctcattgcttcaagggcatacatactgtgtagtgctgagtttcacctggaaatctgatgactttgaaaagaaaaacacatttataaaaattgtacagaagaaattaaatgtgtgatggaaatcctgatggtggagcacattggattttctgagacatagtgttattttcctggaatcccttatgccttctttgtattccagccaataaagaaaaccttgttgttgaaagtggtaggctgctaggatattctgattatacagtattgcttttcctgtcctggtctcggcccctctcaattgctgtaaacttttattttctacttcctattgctaattaaacatgtatataatgtagaggctgttgtatagaactgaatgaatcgggatgctatgcttgaatgggtagctacgtggaaatattggatggatactgaaagttcctaagatgccagagtaaatttacgcgggaaaggggatgtcttttcttgggaaggccacagcagatggttcctgcacccctaggggtcagtgggagaatcagctgcaaaactcagtatcagacacagagtggagcctcccttcccttcccttaaaatatgagcactaaatttcaaaaatctactcaggtgaacttgcttgcagtgaaacttaacacattgaaatttcactgttaaatactata

SEQ ID NO: 2929 - DNA, 844 bp, Mus musculus
caagaagagaccaagatccgaactgacgaaaggcccaattcaaagtttatttgttttgagagaaagatgtttctttgatttttttttctgtccctataggttaatggtcagaagaaaacacttttcagcattgatttttatagctagacctgggcactgacaaaaatagcaagatgaagaaccaattggatgccagaaaatcctgagcaatggaaggattgagaacaggagctgggaccaacagacaaggcatgattcatcctggtcatttgagacattccagtgaccactctaaggatgctccatgactttttgacaacattgcccagacaaatgtcagcaaacatccctcattgatggtcagcaagctaacaagatgcacttgagctgaagctgaattttattgctgatgatattttagctagtctctccagaagcaatatcacatcaaacattttttccagtgctgtgtatttgacccaaggcttcatgaatgctaggcaagtactataccactgaatgaaaaccaagtgcgccattggcagtatgactcagaatgtgacttaaacagaatgtatccagtgctcacagagtcatttaataagataaatagaacccaacatagacaggagtctagcatggactagcagtcctatttcctatgtttaaggacatagactgaccctggccttaaagaatcctagggcttgatgcctgatgacatttttctgggagctctttctcacgaatgtaactccaaagttgctcttcttctaaagccagcagcctgtggtatgccttctggttaagaagtcactgcagaagctccctagacaccatgact

SEQ ID NO: 2930 - DNA, 786 bp, Mus musculus
gtggcggcgcggtcgattcatttttatcctaagttgaatccatgagcctggtgcttgcagcatagttttttgtttgttgtgaagcctatgtccttgggcactgtgtggggcaaggccctgatgtttggcaacatgcagattctggtctcctggaaaccttcatattctttcatattctagaaacagatgaatgtcattggcacttggtgaattaattagaatcctgagctaagagggaaggaagctgggtagtgacgaaggacttgagtaggctggcaggaaaggactggggagggaccatttagttgtcccgtgtttttcagaaatttctcattttgcaatgatctgagacttgaaagaagttacaaaagaatcagcaccttaccttggttctgttttccacacactgaaaatatttcagtctattttcatctatttggaccattttcaaaactaaaccctaggcccggcttggctttcaccagttttcctacattgtattcagttgctcactggatacttttagcctttgtggttgtaatctggctttggtggcatacaggataaaggattctacctagatattactctacaaatgagagaaaacatcaaactgacaagctcttttatcagggaccagtactccagctgtttgctgaacccactttcgattacagctcatcattgctgggacccagaaacgagcacagcgttacacgggagtcatatgtaatcgatcagctctgctgtttggcacccaaacaatccaaggacaattaagaaaag

SEQ ID NO: 2931 - DNA, 732 bp, Mus musculus
tgtctcagtttaaatcccttacaggcaaaccctgaggctcatcttccagggattctagatctaaagatgatatcaactaacacaaatatattacatactgccccaaacacgggcagtatgttgatttaatgcttattctaggcaaggataactacttatttaggaaactgaaaatatttgatgtgaatatatgaaagcataatggcataaagataagtgctacacacttaatgaaggccccatattttaagtggagtcttctggactagctgttcctcttgtcagtgagttatttagtcaatgtcaagaacattgctgtatactaagatattactagtaactttataaacactttagacttagattttattgtctgtaaattttctttagtagattagttcaaaactttttcactttgcaaaattaaaaatatttgatacttttctagacactcattattgtgcaagtaagaatttagtataccttggactatactgtgttagaaagcttgatttgtaaaattttctaacttaccaaaatgtattttagaaagtttttttaagtgaattttagtttaggattatttgttgggatgatacaatagtttctaaaatggttctaaatgtacttttgccattttgtactaatttatatgacgggcactcagcattcatgattcaactctggacaacttggctctctatatttgcattctaaaatattaagccaagg

SEQ ID NO: 2932 - DNA, 803 bp, Mus musculus
gcggcgcggtcgaggagaaatcgggggtgaggaaaagcgctaaggagtgtaagtaagtctttccccaaatgcatatggttgctggaagaattgaagcactttttccttacacatcctgttttaaaatatttattgaaacttggaactggcaatcaaacttatgtatgtactgaagcatttatacaaccagtttcttcaactcagaagccattaccaaaatggtattcctattttcttcccagtaccagtcagggagaattaaaaaaaaaataaacataattacctgtatttatcatgacaactccagagagtgtgtatgtttctgagtagatgttgatgaggcaggacttaaaatttaaagagaaaaacttgaaactacctattttcattggttattcagcagtgcctaaaatgagcttctgaactattacaaatgcacttgggattcatgtgtacagtgccatctggttctctgggtcaaacttgcttctcctctccctctttcttctcccgtaactaagtggcacacaggcatttcttagtgttcgtgtcggtcttcaaagtgcagagaacgtggtggagagaattttatggatcttttttttctgttaaaattgaatgtctaattatattggcaacatgtaactcggattactgtgtttcaaagtaatcttaatggtagtccagcagcacattgagcaagtgtagcttttctgaaaagtaacttggagaacttcagttaaccgataaaaccaagtcatcactaaatgtcgctgctcttcctctggattgtgatctagatc

SEQ ID NO: 2933 - DNA, 684 bp, Mus musculus
gtggcggcgcggctcgaggtttgagagaaactaattttctttggcaaaagtattacttaaatttttggcctattaaggttcccctagttagtactcggattccccatgctaattgttcagcttgtatgttgttaagacactgttgattctgtaccagactggtttcaaaacaaaaaaagtaccacgttgaaaataaactggtgactgtttttcttcatatggctctagtttggcaccttcactctttccaaaacgtgtctgtgcgccagagatgtcacagttcaagtgtctttctagtgtggctttgtatggcttcctttgaacattgtacatacattgtatctttgttttatggtaataagtaataaaaaatgtagacttcgtattttgtacaaaatgtcctatgtacagaataaaaaaaagttcatagaaacagcaaaaataggttaagtggcacagttatttttctttagaaaatatctgtaactttatgctttagtgaaacgttaagtaccaacatattttttaacatttggtaattcaaaactttttggttttgacattgtttatgaagaaagacttcatgcacttgccatttaatatgctcttttatctaattttaaagaactctttaaaatggtgtattatatggactaaataaagaacatgtgaacttttaaaaca

SEQ ID NO: 2934 - DNA, 808 bp, Mus musculus
caccgcggtggcggcgcggctcgaggtgagcttccccactgataagacttaagctgtccatagaagtgagtccgagggaggaaaagtgtggtttcttcatcatggttacctgtcgtggttctctctcttacacccatttacccatcccgcagttcctgtccttgaatggggggtggggtgctctgcctatctcttgtggggtgatcagcccaaaaatcatgatttggagtgatctgatcagtgctgataggcagtttacaaagggattctggcttgtgacttcagtgaggacaatcccccaggccctttctttccatgcctctccaactcagagccaatgtctttgggtgggctagatagatagggcatacaattggcctggttcctccaagctcttaattcactttatcaatagttccatttaaattgacttcaatgataagagtgtatcccatttgagattgcttgcgttgtgggggagggggaggaggaacacattaagataattcacatgggcaaagggaggtcttggagtgtagccgttaagccatcttgtaaccccattcatgattttgaccacctgctagagagaagaggtgccaagagactagaacttggaggcttggctgtcccactaataggctttcgcaaggcagaggtagccagctagggtccctgccttcccagccaggtacagctctcaggtctgtggaggtaatctggtgaacttctcttcctgcttgcttcttgtgatgtccagagccacagtcaaatacctcctaagaacctggttccttccctctaatcc

SEQ ID NO: 2935 - DNA, 813 bp, Mus musculus
ggacaggtgcaaacctcatgtgtaaacacagtatatttagaagttccactgtgcaccaagtgtgtgagcacaaaagaccaaattgctagactgtacggtggtgtctgttggttggttttagccccttgtagttcctgcaaaggggctggagtcttggggacacagctgtgtgacttgcttgccttcagtgttccacctgcattggaacaaagggaccccagatgaccagcaaaggctggcatgagcagatggcatacgtgagggttcgcaggagcctctctgttctgccgctcacctgctcaggctgcaggcagcagaggttatgacctgggcttcctgcaatttctgcaaccccccgacttcctgcccttgctggctgcgatcccagccttcccttcctccagcccttccactgtttggaagcacctgtgttaagtcctttcctgagcgggctacccaaagtgcgctctgttttcctaagtgagcattgacagcaggctgcccttgtcagactagaaatacaactggtcttaggcataaccaggaaggtgtagatttcaggactttagtgtccctgtatcaagtgggccaagatctgatgttcaagaaggccgcgtagatgtgagagaatgggttcaggccgcaccattctgtttcccatcttcacgttgggatggcacatgcagaaaacagttatctgacctcattatgacatctgcaccctgtggagcacaggacctctctgtctgcatactgttgagctcagtcctcggttcctagttgaaatgcaaagaaatcatagcaattgaataa

SEQ ID NO: 2936 - DNA, 782 bp, Mus musculus
gcggtggcggcgcggctcgaggtggagcgggacttgtcagtatacaacctgctgctggatgttttccccaaggaggtcttccggccccgcaacgttatccagcgcatcttcgtccactacccacggcagcaggaatgtggggtcgcagtcctggagcagatggaacgacacggggtcatgcccagcgcagagacagagttcctactgattcagatattcgggcgcaaaagttaccccatgctcaagttcctgcggatgaagctgtggttcacccgattcaagaatatcaacccctacccagtgccccgagatcttccccaggaccctttggacctggccaagctaggcctgcgacacatggagcctgacctcagtgctaaggtcactgtctaccagatgtctttgcccagtgactcgacaggcatggaagatcccacacagcctcacattgtaggaatccagagtccagatcagcaagctgccctggcccgccacaacccatccaggcctgtttttgttgagggccccttccctctctggcttcgtaataagtgtgtctactatcacatcctaagagctgacctgccacctcctgaggaagagaaagtagaggagatcccagaagaatgggagctgtactacccacagaagctggacctggaatattcaaggagtggttgggacgactatgagtttgacgtggatgaagtgacagaaggccctgtcttcgccatgtgcatggctggtgcccatgatcaggcaacattgatcaagtggatcca

SEQ ID NO: 2937 - DNA, 808 bp, Mus musculus
cacgcggtggcggcgcggctcgaggtttgttagcaggaaaccttgtggaaacacctaatgctgtgtgtgtctggatttttttttttccccctggcataacagctagcgtgagtcctgaggggtggagattctgtagttctttcaagccatcttttgtacaagaagttgcagcagggtgtggtgggtactcctgaaatcccagcaggtgggaggggaatgcaggaaaatcaggagttcaaggccatcctcagctacctagccaagaagcataatttcacacaggtttggagctctacctaggagacttgggacaggaggatcacaagttgaaggtcagcctagggaacttagagcttgtcttaaaaggtaaaagggggctgggtgtgcccaaggacgtaggttcaactctactatccctcctcattccccaaacaaagtaacaaaaacagacaagcaaacacgattttttttacaacaaccaaagcgtctgaatttccaggaaatgctgtgctcctgcggtgatcctgtcaaaatacccttctaaatgatctatgtactctccttaaagcatagagactgaacatttcgccagagtctctccatgaaataccagcattactctcacagctcccttgtaaacctcagaactaattattctctataagcaactggacggagagctgggatcgcacggctcccaccagacctctgcagtccagaaccagggaaagatacagcaggtggccccaccatgccccgtgcatgaactcaaagccagttcacaacattagtaatacctttgggaaag

SEQ ID NO: 2938 - DNA, 731 bp, Mus musculus
gaagcagatctggaaatgcaaactaacatgcacgtaagatctctaggtcggggaacctccttgtgcgctttccctgggatggctgcagacctgtccgaggcgacccacaaatcagcacagaaagtcagagtctgtactcaagagcaaagccccgactggtcccacctacaaatgcttcttggtactggctttattgtgactccacctgccaccgtgctgattaacaaatccagtagctaggcagactgagtcctgagcggaggaccacaagacgtctaggtaggcaggggtgatgtgtctgctctcttaatagtaccagagtccgggtgccacatgtcatagaggaaggcacaacttcagacctgatgtgtctgagctggtgaggcattaaaaggaaagctctagctcacctttactctccagccccagcctgggcccagccggatgtgtaaagaggccaggaggagccccatctgtcactgtcctcagaaatgccttgcctttagccagcggctctcttcctttctcctcctctcactgttgctcaagggcagatttgagacagcactgtctgcatttcccatatcaccatccactcgggtgctctgacttgtctgactcttgtctggacacaagcagatgcagtatacctgtctgatgtccttacacctgctggaggaagtttctggtcttccccaaaaggcattacggggcgcttctcagattccagc

SEQ ID NO: 2939 - DNA, 699 bp, Mus musculus
  misc_feature (615)..(616): n is a, c, g, or t
ctcggctcgtgcgtcgatgaagaacgcagctagctgcgagaattaatgtgaattgcaggacacattgatcatcgacacttcgaacgcacttgcggccccgggttcctcccggggctacgtctgtctgagcgtcgcttgacgatcaatcgcgtcacccgctgcggtgggtgctgcgcggctgggagtttgctcgcagggccaaccccccaacccgggtcgggccctccgtctcccgaagttcagacgtgtgggcggttgtcggtgtggcgcgcgcgccccgcgtcgcgtgagcctggtctcccccgcgcatccgcgctcgcggcttcttcccgctccgccgttcccgccctcgcccgtgcaccccggtcctggcctcgcgtcggcgcctcccggaccgctgcctcaccagtctttctcggtcccgtgccccgtgggaacccaccgcgcccccgtggcgcccgggggtgggcgcgtccgcatctgctctggtcgaggttggcggttgagggtgtgcgtgcgccgaggtggtggttggtcccctgcggccgcggggttgtcggggtggcggtcgacgagggccggtcggtcgccctgcggtggttgtctgtgtgtgtnngggtcttgcgctgggggaggcggggtcgaccgctcgcggggttggcgcggtcgcccggcgccgcgcaccctccggcttgtgtg

SEQ ID NO: 2940 - DNA, 852 bp, Mus musculus
ggcggcgcggctccgagggaaagcatgtataatttctttcaaggactttaatggcctttgagatgttagtctacctagacgaggagttttctgcaatgaatctagtttctgctgtggggaggagtaaaggagattaatcctaaatgaccctataaacctaaatcagttggttgaaaggcctcaaccaactgaagacattctgaataacttctgtgcttagtaaagtgctggccatgcatgcatctacatacatacgtcatatccccagtgcacaaataaaaaaagctacatgtagtgatagctcatgccaaaatcctgggcttttctggctgggctagccttgctgacttagtgaactccaggttcagtgagagaccttgtctcaaaaataaggtagagcatgattgaggaaggcactctatgcaatctatgtccttcataagcacatgtacccccatacacacatgtgcatacacacagaagaaagtctggctctaatgctggatttggttgggcaggcagtcctataatctcaactacttagcaggctgagacaggagaatcatgaattaaaggcctatctgagatacagagtgggctgaaagccagtctgaacaacttagtgaagctcaagaaaaaaaatttacaggttagggacatagcttaccaacgaagtcctaggtcaattcccagtacctgtttttaggggaagtctcatgccagaactgggtaaaaaccagatgcaaaaccccatgggttattgggggttccagcgactcttcaatgatttgaacagctaatatgtttgaaaaacatctccagttcccttgtcactttttactgactttttca

SEQ ID NO: 2941 - DNA, 808 bp, Mus musculus
gggacatcctgccggggccttcacaggagagcctgggtcacagttcagtcacacagctgtctaactttcagggagttcaccaagtggggtggagtagggaaaccagcacccacaagcagtcaagcaggcacacggaggcctaaaacaagcagccgcccaggagtatgtgtgagcccagtttacagtattaattgtcgctggttatccctgtgtgtattgtgactctgtggggagtcattgcctccttagctcttgggtatctgagttcatgaggcttccttccttagatacactacaggatcaggcaggagtctgcccaggtaacctcctccttgcctcacttgagaggcaggcaaagaactgggcctgtcatttgcatagtggtcttggctctggcctccttagtgaggtcttttttggtctcttcatacacacacacacacacacgcacacaggcccccaataataataatagtacatttctagtgttttcttattaaatatagatcacaactagggtatgactcatgctttgggataaaatgttaggtgggagtcgaccttttctaagaaaagatctaactgtggcgaactggaagaatctggactattccagctttctagtgtctttgttgtgtgcttaatgtttgcatgtacaatgttttaaatttgtgacacatatgatacttatgtcaatctagagtccacaaaaagaagaaaataggaccaagttgaaggatgcattgggggcaaattaacctcagcggaaccgcactgatattaaagttgaggatggggggggggggag

SEQ ID NO: 2942 - DNA, 733 bp, Mus musculus
ggtggcggcgcggtcgagggcatttggaagcctatttatgtataataaactgggcaacagaattacataaaacatgtctgtaaatgtcaactaccacaatagaaagtaattctaattttgacagttgtatgaagaggaaataaataacttttatatatttactgagtattggagctcttgcctagaattctattcgttttatggctcttttaagggttctttaaatccttagtatttatttgctctgtgagtgaattctgcagctagtaaggcatttctccagctctgagagctgtaaacatgaccttttcactgtatcatccttatcatcaggaccaagaacacgcttttattaatttttcacataacaactgcaattgaagtcttgtgaaagccaggttgtaaaggaattataggagaaaaataatgcaaccacaagtattagggactgagtaactaaactacttgaagggagaaccagtttttaccatagaactcaagggaaaaagaaaaagaagtgacacaaccttataacccagtgctggggtaggtggagacaaaccatgggactctggacagccatgctagcttgtttcatgagtttatggccagtgaaagactgcaaaaaaaaaatatagacagcacctgagtaatgacaacaacgttgtcctttggttccatgtgcatgacatatgcacatttaatataaactgagtcatggggctggagaaat

SEQ ID NO: 2943 - DNA, 816 bp, Mus musculus
tcacgcggggcggcgggctcgaggagaaatcgggggtgaggaaaagcgctaaggagtgtaagtaagtctttccccaaatgcatatggttgctggaagaattgaagcactttttccttacacatcctgttttaaaatatttattgaaacttggaactggcaatcaaacttatgtatgtactgaagcatttatacaaccagtttcttcaactcagaagccattaccaaaatggtattcctattttcttcccagtaccagtcagggagaattaaaaaaaaaataaacataattacctgtattttatcatgacaactccagagagtgtgtatgtttctgagtagatgttgatgaggcaggacttaaaatttaaagagaaaaacttgaaactacctattttcattggttattcagcagtgcctaaaatgagcttctgaactattacaaatgcactttggattcatgtgtacagtgccatctggttctctgggtcaaacttgcttctcctctccctctttcttctcccgtaactaagtggcacacaggcatttcttagtgttcgtgtcggtcttcaaagtgcagagaacgtggtggagagaattttatggatcttttttttctgttaaaattgaatgtctaattatatttgcaacatgtaacttggattaatgtgtcttaacagtaattttaattgtagtccagcagcacattgagcaagtgtagcttttctgaaaagtaactggagaacttcagttaaccgataaaacaatcatcactaaatgtcgctgtcttcctctgattgatctagatcccacttctg

SEQ ID NO: 2944 - DNA, 618 bp, Mus musculus
ggctcgagcaggagccagtaagtcatcccatctcacagcagagcagtggactgcttgctcgatggccctggtttggagttttttccagtggtaccacactcttttacttacactcatcggcctacgtccacctttgtcctggttcaggggtctctgtatcctggctgcttaacgtggtgtcttcatccctgagatcctgagttgtgttaaagatgaagctgcggagtttctggctgggctgtggctggtcttaggtggctctgcagtaacttcaggtggaatcccaggggtcagggggctgcacatccatatattctcctttttcagtaagaagtagaggagaaaacaggattgggcatgtaagtcgctttatggaggtgaagactagtgggttcctctgatcacttggagatgagccgcagatacgatactagggaggctgggggcatctcacgtggaccgtatcgtgtaataagccttgatttaatgcgcttactttgggagacttgtactgttatgagaaagggattactcacgattagaagcaagccgtcatcccgttccccccaacacccactccagtcttgggctctctcagccacctctgcttcaggacat

SEQ ID NO: 2945 - DNA, 563 bp, Mus musculus
ggctcgggcggctcgagggatctccttcccaattaaaacactcacatcttaaaaagcaggtgtcagaacacatcgcagtgtacagacaagaagaagatggcatagatgtctggactctcttaaatggaaacaaagatgacttcctcatctatgacagatgtggccgtcttgtgtatcaccttggtttgccttactccttcctcacattcccatatgttgaagaagccattaagatcgcttactgtgaggagaggtgcggaaactgcaatctcacgagtcttgaagatgaagacttctgtaaaactgtgacctcagctactgccaataaaactgcggagccctcagaggctcatagccaccacaaacaccacaacaaacatgggcaggagcatcttggcagcagtaagccttcagagaatcagcaaccagggccatcagagacgactctgcctccttcaggcttgcaccaccaccacaggcataggggccagcacaggcagggtcacttagagagctgagacaccacagcaagtgaaggcttgcacctttcacttgcccagaag

SEQ ID NO: 2946 - DNA, 797 bp, Mus musculus
ggctcgagggatggcgagcaactaccagcagatgaaccccgaggcactcaacctgacgcccgaggacgcggtggaggcgctcatcggttcgcacccagtgccccagccgctgcagagcttcgacggcttccgtagtgcgcaccaccatcaccaccaccaccaccctcatccgcaccacgggtacccaggagcaggtgtgactcacgatgacctgggccagcacgctcacccgcaccatcaccatcatcaccaagcgtcgcccccgccgtccagcgctgccagtcccgcgcaacagctacccactagccacccggggccgggaccgcacgcaacagccgcggcgacggctgcgggcggcaacggtagtgtggaggaccgcttctctgatgaccagctggtgtccatgtcggtgcgtgagctgaaccgccacctgcggggcttcaccaaggacgaggtgatccgcctgaagcagaagcggcggaccctgaagaaccggggctacgcccagtcgtgcaggtataaacgcgtccagcagaaacatcacctggagaacgagaagacgcagctcattcagcaggtggagcagcttaagcaggaggtgtcccggctggcccgcgagagagacgcctacaaggtcaagtgcgagaaactcgccaactccggcttcagggaggcgggctccaccagcgacagcccctcctctcctgagttctttctgtgagtcctggcgggtcccgcccccgcccttgccctggcccagactccctattctgcgccctagcgcttggactccttgt

SEQ ID NO: 2947 - DNA, 579 bp, Mus musculus
  misc_feature (319)..(319): n is a, c, g, or t
  misc_feature (368)..(368): n is a, c, g, or t
  misc_feature (376)..(376): n is a, c, g, or t
  misc_feature (425)..(425): n is a, c, g, or t
  misc_feature (482)..(482): n is a, c, g, or t
  misc_feature (492)..(492): n is a, c, g, or t
aactccccgcggtggcggccgtggctcgggcggctcgagggggcagacccctgctcccgcagacagtatggagcactcacttgagagagagcaaaggggatcaaccaggtttggcttttggcttgaacagttgtgtgtgaacaatggaaaaggattggcacccagtctccgtctgctccaattggagcagtaggggtcagccagccactagagccttggggaaaggggctgagaggtgtgcagcttgcttggtagccagcagcttcctgccagcctaccccttggctcgggattgtctttgttgcaaggtctcggcaantttacagaactctcactccttccctcgcctgccatcttctctgcttctngagataangaaccatttgtgtaacaccaatacctaacttaagacagacatgcattgncgtggttgtaatcaaagctgatgctttcagatgatgtaatccatctccaatgcgganaaagacaggncccgtccatccacattgctgggcacccagctgactgtaagaatggaattccaaacacttaacacattcagttctatgacagaaagtg

SEQ ID NO: 2948 - DNA, 607 bp, Mus musculus
  misc_feature (467)..(467): n is a, c, g, or t
ggctcgagcagaggagccctttactttctgctccctttctgagatcctaaatgaatttggaatcaggtcagcagaagaccagtaggagcttttaagttctaaatggtaactgaaacaaaacaggatgtggaactgttagaagtaactataatttgaatacggcagtttgttgctattatatataatatgtaattcccgcactggaggctaaggcaggaggattgggagtttggggccagtctggattacttagcaagttccaggacaacctaggtgggtgtacagagtgagacctgccctgggtttgggagtgggggtatgaaaattagttttaaaaaaatgatagaagctatttcagatagttgtcttaagatttcctacaacaattgaaacttggaatttgaaattgtgtatttgcatatctagtttgacaagagaacttggtagctgtcagttactccatggtnacctttgtatatagacttccaaaggttaatgtcctaacagctacttcattgtttactcatgagaacccagctagtaaatattgatgttcagggctgctggcttgcacagtccttggggttctgttcacatagaacacaaa

SEQ ID NO: 2949 - DNA, 779 bp, Mus musculus
caatgcgtgtttcttagggctgagtttgttgtcaagactattaatgccgcagtgatgggtgctatccccgggttctgcagcggttcacaaagtctaccatgtagctactttcaagcctcattcagataatcttgctaagagctcttctgcacgccctgccggtgttctactatcctctgtcaacactgctttgaacagtgctctgtgaagtgtaagttcttttgtcccaacagttgtactagctgtcatgtggttattgtctgaacaagtcttttgattttgttttccttaaaaagtatatccatgaccgtaccaatcttctgtaatcagaatattataatgctgcggccatttttatagaaggactgcaagtttgtgtcctgggaatatcttgtactcatgtgtttctgtgagctctgagatgaggagtccttgggtatgcctgcacatgtctgtctgggttatgtgggtagacgctaggaattctgctcttaaatgagacagtgggaagccctgaggctcctgagctccctcgccggccaggatttgccacgtctggcctccgccgctgcgtttcttgtggttgtgctgttaatggtaaagtcaagtgccttcaatgctaaaggctcagaaacctttcttaaactgatttcatgtcctatgcaagtgtttttacaacctgcataaccagtactttgtaaaacttgtttacgcttcaattgtacatagggttttttaaaggaaatatatagatttttatttagggctacctcaaaaaa

SEQ ID NO: 2950 - DNA, 762 bp, Mus musculus
ggctcgagtgttggtgcaagtcctttcataaagcactagttctaacatgacttcttaattttagatgacaatattctctcttgagtgccattgataaggttctctgtccaacggccctttaccaaaacttgtagagatattttagtaatggatttataaggtaatattcaattggaggcatgcctttaagtcaaggtgaaaataacaaagatcaagtcccttctcaccctgttaagattggtaccatatactggcaatgaacatacactggtttctgaatgtaagtccacctaaggtagattgatctgatcatttgccttttaaatgtttataatgtattgtgttcatatttgagctccttggacccggatcagtcaggtcacatgatgctagttggccctggtagtgtttctgtgagtttgttcattgtacttggcacagtgatggggaaaaggtttaatttctatgcaaaacatatatgcaaaattagcaggtggctcacataagagaaccacaagacaggatgtacattctgaactggattttagagggaaaagtgctcatcttcttggttcattttgtaatatttaaattgccttttaaaactaaacttatacttttgctatcttttaatgctcatctggtttgaagatattcttgcttcctaccagtgtttactataaagtacagtaattactgactctatttcatgaaaacagttttgaaattgaatgtaacatacaaccggaatcgatgttttct

SEQ ID NO: 2951 - DNA, 558 bp, Mus musculus
cttgctgtgtgtatttgtttgcccccccccccgtgtgtgtgagtgtgtgtgtgtgtgtgtgtgtgtgtgtgtgtgtgtgtgtgtctgggcccgtccatgtgtttaactcctttgttttggatcacttagaagccttctttttcaagggtagtgcagtggctccctccaagttccgagacatgagggatttagaaggcaacactgtaatagaggaagttgggttttaagatcttattaaacatacaactgaagacacccctcccacacaagaccctatttggggttattaatgccattcataaactgggatagcttttcttcatttttaatatttagggcctctctgcctttgcagcttcgcgatcttgcttaagagagcctcctgcgttgcctgttctatgaatgactccagtgagaaggagaggctgttgcgcacactccagtgaagacagctgttactggaaagagttaagttcattcattcaaaagcgccctttcgtaagtcctggaggaatttgctagaggcggtaggttctccaaggctttctgggggtgggg

SEQ ID NO: 2952 - DNA, 686 bp, Mus musculus
acattgtgaatggggacatccaggactctacacgctcggacctgtatgaatacatcgttgatttccttacctactgcctagaccaagagctggtgtggacccatgctgactggctgctgcagaaaagtgaggagattggagttcaaattttcaccaagagacctttggacgagcagcagcagactagttttaatccagacaacattattagttcccttaagaaataccctaaagccctggttaagtatctggaacatctcgtgatcgacaggagattgcagaaagaagagtaccacacccaccttgccatcctctacctggaggaagtgctgcggcagagggtatccactgggggcaaagatgtagaagccactgagacacaggccaaactccggagactactccagaagtctgacttgtaccgcgtccacttgttgaaagagaaagtccagggtgccggcctgcccatggaaagtgccatcctccacgggaagctgggcgagcacgagaaggccctgcacatcctggtgcacgagatgggggacttctctgcagctgaggactactgcctgtggagctccgagggtcagggtgcagcctgccgtcagcgcctcttcacacgttgcttctgccatgtacctctcgtgcaggcctcctctgcccaggtatctgacagtgggccggtg

SEQ ID NO: 2953 - DNA, 347 bp, Mus musculus
ggctcgagaggctggccaacagatacgttgcgtgttcaaattcagggtgggtgccactgtcccctcgagtgtctcattaatgaggcaattcttcattttttaaaagacaaatcgtgtaattaaaagctgattattcacccatcaaacggttcttcagtcagactgcagtatcccttcaaatagtggcttccccttggctgcatttatttgtgtagctcatcagccatttagcagagagagcactgtgcttgctgagagtgggcacccagggctgaaggacagaatgacatgggagagaaagcatttgtgggcccatgacatttactccaagaaatcctccaaaaaaa

SEQ ID NO: 2954 - DNA, 658 bp, Mus musculus
ttggagctcccgcggggcggccgggctcgagggaggctctgcctcttcccatgtctcccagcctccacacagcacccaggaatgtctaagcacaatttctacaagcatcttgtaagggggatggatgagattagtccagtttctctcttgctactaggtcctttgcttgaagatgatgaagatgtttttagttagggatcttctctctgctggaggcctataacactataggaattaggggaaaaccttttccataattgagagcaagtgacacacctacttttcaggttcatccacctccagtggaatgttttcagtcaaatgagaaagaaaataattgatctttaataatacagccctatattcagtagatgcagtttatactaaggttacaatataaatatatacaaaataggtgcctttttgattatgcttgtttatcattatggtcttagaaaggaaaccaagcaagcaagcaagcttctgcatattctatagtaatattttatgatacatgatcaatatttttgtggtgagaagtgggatacccttgaaagaaagatactacaggtggtagctagttgtattttccttctaaaggtttataatactagaaaatgctgacttattcaattttctgagaagtttttttgtggat

SEQ ID NO: 2955 - DNA, 737 bp, Mus musculus
tctagatcgcgactggagtttttttttttttttttttacgagaaatggcattctttattcataaataaaaacataaaattagcagaaatagtttacagagccgacaaagaacttcaaaaataaaacaaaatgaagccatcaagagcaaagcaaaccagaaacaaggaagagaaaaagaactgtgtacgtagtcttccaaacgccagtccatccgaagcagcctgctgagggctccagtgctcaaaagggaaagaaagcagtctccactgaggggcactgtggccttaggtggcatctgaggagatctcaggtcctagggaaatctctggtccagcctggctttcccgtggacatctctcttacctgagacacagcccaagctggagccagggacgagcagatcagcaagtgtcactcagagaagtgatgccaagacccctgaaatgtcatcatgctaaagctcaagtgtacctagagaggacaaaatcaagcagggaggtgccctgtgggagtctggacactacaaggccctttcttccttcagagagcagcaacactctggaaccagacacctctgggatgcagtatgggtccgagagacaaagcaagacaggctactcgtctgccctgaacccgcacacctgagtcactggttccatctagccatccatcatgggcatggaccacaaactgggaggatgctttaggacagaaaaggaaagaaagcacacaggaag

SEQ ID NO: 2956 - DNA, 810 bp, Mus musculus
ggctcgagtaaaaatatcagaaccagtgactgtttcattgcattctcattttgcatttgctttgccgttcaaagcagaaaaatcttacaaaaccgaaagaatgctttaaaattgtcacgctggtgcttaaagatctattatgcttgatgtataactaacttgtttccaagaacggagcctggggaaggcttataggcctttcctagtacttgtgattattgattgtcaagtcttccaagtttgcaatgtaaataatgtgtaacaatgtgacattggtgttttctaatgaggagtggatgaatgcttcagttattacttctacttcatgataaaagttttcaccaatactgagaaatcttgatttttgtaaccttgcaaaataacctattacatacaagttgattgtctcttacctgaaatgcttggagcctcaagtattttaagattcttttttccaattttggaatcatctgcagatgtataatggaatacctgggatttgctgtatgagccttgtatgtgtcatgtgacagaaaatcatgttttaatggacttgctttggctgtgactttgcaattggtctatggaactttccacgggcattatgttaacactctcaagtttccagttctggagctttctaaaatttatatttccaaattggggatgcttaacttgtaagtcattccagatgtggaggtgggcactacacaagactgctggcaccagtttattgtagaaaatcgatggtggtaccaaataaaatgtatgcataccaaaaaaagaattcgatatcaaagctatcggata

SEQ ID NO: 2957 - DNA, 729 bp, Mus musculus
ggctcgagggaacagcacctcacaggaatacggagtcagcgtttacagaagaaccctcactagtttctgatacgatcaaggccaggggcggggcataatacagaaaggaggaagaggaagggaaagaaggaagggaccactgtcatagctgagtagtagtttctgtgaatggtagcatagctcagaggttctgagcttgtcctgagccatcactggacatgctggctttgtgtaagttcttcttaaatccacttgacatcacgacattctttcccttggcagcgggtccttcctacgtaaaacatcagaacaggttgtttatcagaagataccaagatccataatgtatcagccaggtttaaaaactcttgacatgtttaatgatgaactcacaggtcaaccaggctttctgacgtcagtccccaaaacccatctgtagatcagaaccttgccgaaacctctgtgcactaggcgctacttagggcgtttcatttctactgtccatacttgtctctacgagacatgagaaagtgcaaggctgcgagagggggttgggtagagctcggagcaggtacatgacatgtcatttggtccctttgatgtgctgggtagagttggcgttgtagagaccgctgtgttcatgcaatcactaattctatgttgatacaaataaacagctaaaagagaaaaagtaaaccccattaaagctattaaactacaaaaaaagaa

SEQ ID NO: 2958 - DNA, 839 bp, Mus musculus
ggctcgagtacaagtgctcagtgcccttaggaggtctgtatgtaaaagaaacccaaaatctaggtgaatttaatgaaataacatacttcatacatatacaatgtagggaggtgggcaggggctctattggattttctctgaagtaaaccattttagagagctatctgctgttatccccagtgccttgaactctttagaggaatagcatttaaaaacaacaaaaaaccacaagtaaacttttgaggtgctaatgaaagagaaggaaggtaagtacttttgaagtttgggcagaaatgggaagggggtgactcttaaaagagtttttcatccatctacatggaatctggctgtttcctctcaaagatgtttagaaaagtggttcaagtcaatactgagccatacttaagatctggccaaactgggagcatgttgttcatgagctgtgaatttcaagaatcagcttagaaagacatggttgcagcagtaggggagacatttttttttaaactatccattaaatttgttacaacttataccaaaacctgacgttttttcataattccacctcctagttcttcctgtatttgtaaatagtccctcctagaaaataagcatcaactggaatgtgtcaaatgactttgcttagttttactatcagccactagtgaactcttcttcctgagatgcataaggtaaaataggattagctcgtgctaagtgttgaaaaatacttggtactggtttcaaagagaattgcacagtaacctttaacttgggggtggtccctctctctgcttcttttcaaaaaaaaaaaatgggaggtcagggctcactctgac

SEQ ID NO: 2959 - DNA, 773 bp, Mus musculus
ggctcgaggttttctcacatcttttagatataattcacatagtataaaaattcgccattttaaaaagtgtaaaatttgtggttatagtatattcacagagttgtgaaattgtctttataaaattccagagcatttcatcgctgtaaaaagttttctgtacccattaagagtgactgcctgttcttaactccaacccctggcaactactcgtcttcgtatgcctatgaatttgcctattttggtcatttcatgttaatggagtcatacaattatgtggcctttttgtctgtttcgccaccttccacaaagcaatgagttcaaactgcatcaatgttgtagcatgtactggtactgtttcttttgtggctgaatattgtcattgtattgatatgctgtatttttttgcttgtccacttggttgtgcatacatgtgttctttctgctttttgcatattatgaatacaactatgaacactttgtgtacatgttttcatttctcctactgtcttttaagtatcttatggttttggttcttaaatttaggtctttgattcatttttgcatgtggtacattttagggatccagtttcattctctaatatgtggatatctagtagaacaatacctaattgttacaaagactattagtaatttccttatgagtaggcttgctatctttgtcaaaaacacgtacaaatgaccataaatatggctaatttggattcttgaactttgtcccattgtcctatgtgtgtgctcttcctatgccagta

SEQ ID NO: 2960 - DNA, 822 bp, Mus musculus
tggcttcgaggagaaaccctgtctcgaaccccccccccaaaaaaaacacactaggcagcccttataaaaccacaaaccgttagtccagaatgggcctcagggagcatctctgaactcagagaggcagaacaggctggccaaggtcacacagcctatcacagactggtcactagcccccaggccacttggcccccgagtctggaactattgctttttctttgtagaaaacgtccagccaggtacacaaatgtcctcactcaaacacagccgtcctttttagaccttttattaacctccaagcttagcctgggctccttctagaatgttcttgacggctgtaaaggcttatgtgttggttactactcttgttgctgtgacaaagcaactgagaaaacaacttaagaagaaaggagagggtctaggggctcacagctccaggatgcgatccatcatacagcgggcatcgtggcagcaggaatgtgagggggctagtcatgttgtatcgggaggcagaggaaggggaaggggggaaagagtgtgtgttagttcaggttgggacccccagtccaggggatggtgctgcccacattcagggcaagccttgcctctttctggaaagaccctcagagtcacttccagaggtgtgtttccatggatacaatgggaatgaggcatcacatcttgcatctgaacatgaacgctgctcttcacccaggagtcattctccataagcaaaccaacgactcagacaatttacataggcacattgagctcagggacagtaaaaactggcttctaaccatttgattggcgttgccttcc

SEQ ID NO: 2961 - DNA, 664 bp, Mus musculus
  misc_feature (61)..(61): n is a, c, g, or t
gggcggccgtggtcgggcggctcgggttacccaaaaaatgaatttaagttcaattttaaanctgctaaaaaaacaacaaaatcaaaaagtaagtttagattatagccaaaagagggacagctcttctggaacggaaaaaacctttaatagtgaataattaacaaaacagcttttaaccattgtaggcctaaaagcagccaccaataaagaagcgttcaagctcaacataaaatttcaattaattccataatttacaccaacttcctaaacttaaaattgggttaatctataactttatagatgcaacactgttagtatgagtaacaagaattccaattctccaggcatacgcgtataacaactcggataaccattgttagttaatcagactataggcaataatcacactataaataatccacctataacttctctgttaacccaacaccggaatgcctaaaggaaagatccaaaaagataaaaggaactcggcaaacaagaaccccgcctgtttaccaaaaacatcacctctagcattacaagtattagaggcactgcctgcccagtgactaaagtttaacggccgcggtatcctgaccgtgcaaaggtagcataatcacttgttccttaattagggactagcatgaacggctaaacgagggtc

SEQ ID NO: 2962 - DNA, 736 bp, Mus musculus
gtttcgaggaataccagcctatcctgggctacagtgtaaggccctgtattgagggaggacaaaggaggggagagaaagagagacagagatagaatgagaataaatctgcccacagatttaggtttttatctaagctaggcaaaatagcaggatatataatgctattttaagtagtcagttgtaggcggcagaccaactcggtgtcaatgccttttgtgtaggaccaatcggcaagtatacattccctgagaagtttgttcccacaccttcagaacacctaggctaaaatgctgcttctataattcctggacctaacctaagagaatttctctgagggcccatttagtcatccagacttctgtctacttacgagtagctttcgcagaagggcactgtcatataaagtagtctgtcatgcactttacaaattataagcttgtacagccttatgacagtttattctaagcatgaaaactggttcatgagtttattaaatgtagctctgtcagcctgtggcatatgactgtgacacatgtatgtgaatcttctggacaaggttatgttttaaacatgaaatttcagtatatgcttaccagtttaatatttggttttatcttcaggtatagtttatggtactactgaaaatagtttaatattattactctgatctgaatttgtaatatacaatctactttgagatgattaataaaaatttttaatctcttgccgaaaaaaa

SEQ ID NO: 2963 - DNA, 826 bp, Mus musculus
ggctcgaggcggctcgaggtaaccaagagccctgtcctcatgtgtccaggccaaaagcttgtgtgcccagagctgacacccatggtttggaaatgatgaagaaaattaaccttatcctgtcacaaagatgggaaagtgtttgtgtccccagttgtaggttctcttgatgccttccagggtttgtggaaacaaagcagttcattttgacctattctggttagaatcagttttccacctaaattatcttgattcatctttttctattgctgggttgatttgtttgcttgctttctttagagcagtttaaagtgcacaagaaaagcaatccgaaattgtattagttctctgtgctctcttcctccctttccacccagtttccccatcatttacacttggcattggtgcagtacccttggtgcagggaatgggcaagtgctgctgtggttgattactgagatccatagtttgcactggggctccccctttgtactctacatcttgtggttttcccaggcgtaggcttgaatgtcccgctgcgataccactctcctcttccttctccctccctccctccatcccagaccccttggcttagcttctcactcaacacaaatacagatctactgtctacttttctgtcagattgcacaagctagagagcctttgaaaggagggaatttaaattgagagaatgtttccacaagatcaagctataggcaataaaaacagctgatagatgggagatggttcaaaccactgtgggtggggctatcccttgggctggaggttctgggttctataagaagcagggctgagcagccatgga

SEQ ID NO: 2964 - DNA, 630 bp, Mus musculus
  misc_feature (48)..(48): n is a, c, g, or t
  misc_feature (215)..(215): n is a, c, g, or t
gggtggcggccgctggttcgagaaaattattaaccactcattcattgnacctacctgccccatccaacatttcatcatgatgaaactttgggtcccttctaggagtctgcctaatagtccaaatcattacaggtcttttcttagccatacactacacatcagatacaataacagccttttcatcagtaacacacatttgtcgagacgtaaattancgggtgactaatccgatatatacacgcaaacggagcctcaatattttttatttgcttattccttcatgtcggacgaggcttatattatggatcatatacatttatagaaacctgaaacattggagtacttctactgttcgcagtcatagccacagcatttataggctacgtccttccatgaggacaaatatcattctgaggtgccacagttattacaaacctcctatcagccatcccatatattggaacaaccctagtcgaatgaatttgagggggcttctcagtagacaaagccaccttgacccgattcttcgctttccacttcatcttaccatttattatcgcggccctagcaatcgttcacctctcttctccacgaaacaggatcaaacaacccaacaggattaaactcaga

SEQ ID NO: 2965 - DNA, 573 bp, Mus musculus
actccccgcggggcggccgcggctcggcaagtctccatatagagctagtcatctgacctgcagagaggacatagccctgagctcccaagacacaggaataatagatattcctctaccagcctggggaggacagaagacaggagtaaccatcccctgccccaggaaggtgattgttatccatcaccgttttttttaaccacacagagaagagaagagatgtgcataatctgtactttgccagacagggccatgtaccccagggtggtcatataaattagaatccttaaggatggcacaccagagtgttcctttctggacactaactttgaatctctgggaatagagccagaagacctgcctcttctcagatatatcactgcacaccacatactcagaccttgctgtagattggacaactctactaactctgggtctctctgagcaagagtaggagcatttgtagtgtagggttgtggtttgaaacagaaactgtccagtcctcctgtctggcactgttaattcttagtctgattatttttcaatgaccatagctgtatcccagaggcagattcc

SEQ ID NO: 2966 - DNA, 566 bp, Mus musculus
cttctgtcaagcgcagagagaagtcagccctcctggagctcgaacgagaggccagcagaaagtagacgaaaaccctctgaaaaaggcaaagcggtaatggtggctctagctttctgactaacaacccagtggaaagaaaatggacaagccttgccccatggcctttttctttttttaaaacaagagaaggatctgcatgtgctgtaagttcctaggtgcaagcttgttcattttatgttttaaacagctttacaaaccattgttcatggacggtattatgtacattcacttcagataaaggaagataagtttactttgtatcagaactcagcaaagtagttgtatattttaacagcagaaattggggtttccaatgtgacacatcaagaatggaatccttccagcccatcagacaccaggctgcccatggggatctgtgtatagtatataaacatgtaaaaacaggctgtattttactcaatgtatgatgctaatcaatgaacactttatttattttacagagaaatcttatctgtgaactttactatatatctgtttattttatt

SEQ ID NO: 2967 - DNA, 599 bp, Mus musculus
  misc_feature (582)..(583): n is a, c, g, or t
cactacttgggcattggagctccccgcggggcggccgcggctcgaggtcttactggcacgcacatgaatcctctggtaataaaggcagctgtggctcagctcccagcttattacagcaagcaagaaagcaaaactcattgcagtggactctttaagctaataagggaagccaaatatatccagctcctgtttgtttttgtttgtttgtttattgtttttgtttgttttgtttaataggaaatctagttgttcaatattggctactattattttaattttatttatttatttttaaagatgcgggcagaaaagtagcttcatggttgtgcttaggcaaaatcctctttctggaaaggtgggttgaaatgagggaaagaatttaggggtaaggagtcatggaaagccagagttaagagtgcaaaaagaacagctcacattaaactataagactccaggtttctgcttagtagttccctcctgagaaaacctgtcttctgcaggagggctggctcattcacttccctggcctgtgctgacgaggaaagagtgtgacctggggtctgaggtttgaatctgctcagnngcctcccccaccttcg

SEQ ID NO: 2968 - DNA, 646 bp, Mus musculus
gctccaccgcggggcggccgcggctcggcggcgaggcttatattatggatcatatacatttatagaaacctgaaacattggagtacttctactgttcgcagtcatagccacagcatttataggctacgtccttccatgaggacaaatatcattctgaggtgccacagttattacaaacctcctatcagccatcccatatattggaacaaccctagtcgaatgaatttgagggggcttctcagtagacaaagccaccttgacccgattcttcgctttccacttcatcttaccatttattatcgcggccctagcaatcgttcacctcctcttcctccacgaaacaggatcaaacaacccaacaggattaaactcagatgcagataaaattccatttcacccctactatacaatcaaagatatcctaggtatcctaatcatattcttaattctcataaccctagtattatttttcccagacatactaggagacccagacaactacataccagctaatccactaaacaccccaccccatattaaacccgaatgatatttcctatttgcatacgccattctacgctcaatccccaataaactaggaggtgtcctagccttaatcttatctatcctaattttagccctaata

SEQ ID NO: 2969 - DNA, 685 bp, Mus musculus
ggctcgaggcggctcgaggtcacacgtgtactcctgctacttccatgtctcctcactgagggaatgagatgttaataaccaagtgggacacaggcttggtgcagaagatggattttctgtaggtaaactaggttaggatgcaagataaagactaagataaatgatgttgcagatacctttccaatctggcagctagacctttctagggtcttatttaatgagccaattttttctgttgtcctctatgaggcagcccttggtgcacaagcctttgcttttcaggctgcctgcagaagactaagttctctcccgtctacacagaacagggcccactgacttggttaatttctttaatatttttgtcaaaagggcaatgggagggtttgggccgtaagccacagctgctgttagactccaaccatacaagagtaggtatgagtcactgacaacttctacagtagtaatttgcattcccatgtaagtcagcagctaagaaaaacattccttcaaagctatatgttgtacaaaaattctaccagaacctcataggcaaagccattgctagctctgccattccgaatactcagtctagccaccaggttgctgtgatcacagttccttcctctactcggctcctgtggattctcaacgctgttctcagcatcttccccagtttctactcaag

SEQ ID NO: 2970 - DNA, 638 bp, Mus musculus
tcactacttagggcattggagctccccgcggggcggccgcggctcgagagatgcaacactgttagtatgagtaacaagaattccaattctccaggcatacgcgtataacaactcggataaccattgttagttaatcagactataggcaataatcacactataaataatccacctataacttctctgttaacccaacaccggaatgcctaaaggaaagatccaaaaagataaaaggaactcggcaaacaagaaccccgcctgtttaccaaaaacatcacctctagcattacaagtattagaggcactgcctgcccagtgactaaagtttaacggccgcggtatcctgaccgtgcaaaggtagcataatcacttgttccttaattagggactagcatgaacggctaaacgagggtccaactgtctcttatctttaatcagtgaaattgacctttcagtgaagaggctgaaatataataataagacgagaagaccctatggagcttaaattatataacttatctatttaatttattaaacctaatggcccaaaaactatagtataagtttgaaatttcggttggggtgacctcggagaataaaaaatcctccgaatgattataacctagacttacaagtca

SEQ ID NO: 2971 - DNA, 738 bp, Mus musculus
  misc_feature (738)..(738): n is a, c, g, or t
ggctcgaggctgaaccgccacctgcggggcttcaccaaggacgaggtgatccgcctgaagcagaagcggcggaccctgaagaaccggggctacgcccagtcgtgcaggtataaacgcgtccagcagaaacatcacctggagaacgagaagacgcagctcattcagcaggtggagcagcttaagcaggaggtgtcccggctggcccgcgagagagacgcctacaaggtcaagtgcgagaaactcgccaactccggcttcagggaggcgggctccaccagcgacagcccctcctctcctgagttctttctgtgagtcctggcgggtccggcccccgcccttgccctggcccagactccctattctgcgcccctagccctggactccctgtccctgccatggccccggccttgacctgtttgacttgagctagagggaggaaggacgcgcgggtcgcgggagtcaggcgggagcacgggcgggcagagaaccttggctaagaagagggcagctcagggcggcgcagcctcttagacttgggcagagttagagaaacccgggcgggtgcgaggtccgggagtaacttttctccaagctggaaggccgcgaggcttattccaaggagtcgccaaggccgtctggacacttctggctctgagaactttgtgagtgccagggccgccgctttgcagcccaggactcagttcgtcccaggaagagcagaggagaggagaggactcn

SEQ ID NO: 2972 - DNA, 829 bp, Mus musculus
ggctcgaggcacccttcacccctttaagtgtgtattttaaccaaatgaagttgacaagaaaggcatatgttggggctgcaggattcctagtgtagtagaagcattgtatagatagagatgttgatatatatgtttgtgtatatatatatcaagccaaatttctgatagaaaagtatagctttatggatgagaaggaaaaggagccctctagaggttggagccagcctcgatgtgtccaatgagcaagacacgccgtgcttcacgcgcagctaaggccccaggacccggccctggcctcacctctgcaaagctggggggccccgaaggctctgctgctctctgtgggtccccagcaatgaaggcataggagagtgaggagacagagatcataaggactggaatttttcatccctttttgctctggccacctgttttgagctacagcctgattatatcacatttccaaaaagtagtaccatgaagatggcgagagagatctgtcacaatgcttagctttcgactgcctgtggcttcaggatgctcaggacagaaagacacactccccaaaacaagaacatggagaaggcagacctggcagtacccatccccaaggccaaggaatgaggctccctcccccaggtcatctcacctagatctttctcccccaggtcatctcagctcagtcttgatagcctctggaaagccctggcctgtcgtgttccttcactgtgtggtttctgtaataaaagtgttaatccatgttaaccctgtgtggggattatcgcgtgcaacagtatttctcggtacctcttctccctgtgacgtgtcc

SEQ ID NO: 2973 - DNA, 674 bp, Mus musculus
ttcttgctcgaggcggctcgaggattgtgccaagctttctctaagacatgtaggatgaaatgtttttgtgtgttaatgcatgtatttataaagatttgattactgctgagaatcactaactcttgttctcatccccaaagtgtttgtttcttccacatgctggaaggcttggcttcgagtatacgctgttctggctttcctttcacaaaggcacgttcaaaattgtctcagaaagaacgaatggtctctgacagtgaggtgtgactgccagagctttctgaagtttgagcagtgtgtgcagctctgcatgtgtgtcctgacagagtcagatatgtgagccattaaaagaacattgtaattcagagtgtttatttaagtaacttacatgtctgaaatttatttatgtcagattccatcacttgttatcatttgtagtgcagaatacatgaactgttcttcatttagtgctccaacaatctattttatttttagaaagtaaatttaaagccaagctgcattcaacttttaacatagtgttctaatcatactgatgtgatcatctgtgacaggtcatcttttaacttttctggaaagtcaatggttcttattgtaatcacataaagcattgtctttacatttttaaccctgtatgtacttcagtatggctctagccc

SEQ ID NO: 2974 - DNA, 669 bp, Mus musculus
  misc_feature (35)..(35): n is a, c, g, or t
tggctcgagatttctacacagcattcaactgcganaatgacatgaaaaatcatcgttgtaattcaactacagaaacacctaatgacaaacatacgaaaaacacacccattatttaaaattattaaccactcattcattgacctacctgccccatccaacatttcatcatgatgaaactttgggtcccttctaggagtctgcctaatagtccaaatcattacaggtcttttcttagccatacactacacatcagatacaataacagccttttcatcagtaacacacatttgtcgagacgtaaattacgggtgactaatccgatatatacacgcaaacggagcctcaatattttttatttgcttattccttcatgtcggacgaggcttatattatggatcatatacatttatagaaacctgaaacattggagtacttctactgttcgcagtcatagccacagcatttataggctacgtccttccatgaggacaaatatcattctgaggtgccacagttattacaaacctcctatcagccatcccatatattggaacaaccctagtcgaatgaatttgagggggcttctcagtagacaaagccaccttgacccgattcttcgctttccacttcatcttaccatttattatcgcggccctagcaatcgttcac

SEQ ID NO: 2975 - DNA, 529 bp, Mus musculus
tggctcggaggaagcgggccggggagagaaggtttgtggaggggaaacaaggaagggggataacattttaaatgtaaataaataaaataaccaataaaaaactttaaaaaattaaaaacgaatggctattgtagcatacttgttatagtaaaataccagaaattacctaaatctttattattatggaataaactacaaaaagttcagagtatgcaacatgaatatcatttgcctttaatctaggcttgcagataatgtgtgtattttcaggacatggtacgagttagaaatatttcaatatacagcaggtggcatcttttatacaatatcacttaaagactatgaatgtatatttatatgttgatgtatgttatatatacacagattaccacccatgggtatacatgtgtgtgatggtgcatattgctataaaatgatttcttctcatatgggattgcacttaactgactgctttccagtggttacgctaaggtgtctcggctttaaatatatatctgcaacatatgct

SEQ ID NO: 2976 - DNA, 742 bp, Mus musculus
ggctcgaggtttctgcttggtaacactgactatgaatgaaaaaaaatcaaccctgtttcttttgctgaagaatgaacaagttagagaagaagttaagtttgatatgtttatcttttgtatcatgtttgtttaaatttgttgaaaaactacacatctatagtagtagtatggaagtcatataattgttaatttcagaatgttgaaaattcttcagtgcaacccttagtatactgtattacataaaaaattgattatgacactatcaaattgctgaaagtattttcaaaagttactttaaaactaaattatacccattcatgtgtttgatttttttttgttgttttttttttttttaatttctcacttctgagttgtcagatactcagattttgaaaataaccacggggagatgccacagctctctctagaagactatcgttcaagctaggattgttacaattaagcttttcgatattagaagctttcttaagatatataattaagatatataaaatagattatatgtaaatcattcctaaagcacaagaagtgaatgtgccttgatgtacatatataatattagaacgcttattccagtttactttgaaaatggctttaaggttaaggagtaatgtgatctctctgcatgcatcttcttgcatacggaatgtgtgcatttgcaaattcgtcatcgttttaaaagctgtgtggctttcagtttaaagtgaattataacagctca

SEQ ID NO: 2977 - DNA, 591 bp, Mus musculus
cgcggggcggccgtggctcgaggcggctcgagcagcctcccagagtcttggccagatctgtagaaaacgggaataaaccgactgtcccccctcagggtttttactagtcctgtgggcagcctggatgtgctagctacaccttccccacatgttgttaggcctggtttgtgagatagaagatggagtacctgaccacctttggcctctatcaggggtgggaatatgactctcactggtgacaagggcctaggtggcaaatgaagtggtttgagcagtaactctgggtgcaggacattgagcatatcctgctaccacatgcttcaccccccattgtcaccccacatcctgggcatgggagtggcccctttaaccctaccctgccaagaaaaccaaacagggaaaacaaagatgtaggactattgacctagctctttaacttgtagccagctgtcgtcgttggtctggcaagagggctcatggaggaagtctgtctgcctcccaggatagcagatgaggtgccttcccagtggaccctgctgctgctcgcttgctgcagagaattgtttgcactaaaccccactcttcccccaa

SEQ ID NO: 2978 - DNA, 701 bp, Mus musculus
ggctcgagcttacgttaacaccttgaaggtatgagcaagaagctcagcaagagacactggctatacccttactatgagcctaacaggtccaccaagggccttgtacttaaatacatcattttgggtttacattgcttctcagagtgatagaattagttctccaaaaagttataggctatttaattcttgaacatcaaaagagaacaatattcctagaaatgttatagtgaatactttgtttaactcatgaatcatatcctgcaaaaaaggattgctttactttgtgggaatagtcatagttcttcctaacaagagcacagacacttctcctggtctcctgagacagcatgtcttcactggcttcccagtgcaatactttttgagagtcagttttgaaccacctccatcaaggatctgaagcagtttgagggattatattatttcagaccctaacttcccatctggttagctgttgttctctagaagctacatgttgctaacctagaaaagtgcaaagtcttagctttctcctttctcacttcaagaagaagctctggaacaacctatctggtgctcaattcacagtgattcacttacacaggccacatgtcttgagcttcttggtgctataaccaatccaatatgtttgatgctactcctgttgctaattcaagtattttctttttaattcaagatttatc

SEQ ID NO: 2979 - DNA, 586 bp, Mus musculus
ggctcgaggtccttcagtgcatatgctgcacaaaacaaaacataaatctgcacggcaccaaaaaccaaacaaaagcaaaccaaaaacccagacaccctatgtatctgttggaggcatgtaggtggtacaaatgactgtagccatgagcacacatggcttcttgtcatgtcactttccataattatttactgcaaaatgattgagaggcttttggtgcaggcagccattagcctcctgcttcctttgttacccctggatcactttgcagtaaattgcaggtcttttaaaagattcaagcttcggttttctcaaaacaaaacaattatcctgtcttacctgaaaatgcagggttgtgggcaaaagaggctggttataataatgccctcatattgagtggtctgtaaatggctgcacacttcaggcactagagttgctgaggatgctttgttaatgtgaccttgactggctttacaggcgtgtagaacagtctacacgggcgactatttgcatccatcttgttgttgaggtggatgaaaataaggaaagactggagtgtgtaagtcatgcacataagtattcactgtaa

SEQ ID NO: 2980 - DNA, 808 bp, Mus musculus
tctcgagcgagtgcgcgcacatgcacgcaaacaaattttcaattgtttgtttacttttaagatgggtctaacttagcctagtctgacctcaaacttgctatgtagctgaggctggccctgtattcctgatctttctgtttatatctcccaagtgctggctttacaggtatgcaccgtcattcggttccttactcaaacatatgttcatttagtcaaccctttttattctccaaagagagcaggctatctattatcctgtgccaccatgaaaaacaaatcccaacttccgaagctactttaacacttgggtgtaattcacagtacagtaggggaaaaggaatggacatttaaattatcttgagcagcataaataatggctgatcaaccagtctgtaaataagaagttacataatagctcagtagggaagggtcagaagacttcgggtgagcttagcttagaaagtttatcatctcaaagaagaacatgacctttgcctgggacacctcaggtaatgactgctgctctctctcttgcttacatgcaaaccaaaaggaaagaaaaatgagccactccctacccttgctctctggtacctaaaaaccatagactgtttccacgcatgctgggtggaaggggagccttcaggtcattagtgggtaatgacaatcacgctgtggtcacagtgggccctcgtactctgccgagctgtgtttcaatttcaaaccgacagttcccattacacgtgagctggttaacctatgatcctaacctggctcctaccacagggattggcacttccaagcaatt

SEQ ID NO: 2981 - DNA, 792 bp, Mus musculus
ggctcgaggtttcacagaccagatatcataaaattatccgaggcatgtggaggaagtgactgggttcacttgaagacaaatttccaacagtgcaatgacctgaaagtatccctctaccctccgttcctcttaccctgctgagagagggatagtgaagaagagttgccatgagtccctaggacagaaaggtcagtgctattggcagaagcaatctgcctgctggaggcttcctgggcatctcagattccatttggaccaatccatgccttacaggtgataaagccgggtggcaaaatcacaaaggatatttatttttgctttgctttggtgtcaaacttagtctttaggcatggtgcctggttcaatccacccatctttaagctcctttcatactcggtataatatgtgcatcttctggagaatgtgctgtgcgcttgctctgccttctctgagtctcttccagcagttgtcagtacccttctatccaatctctgagcatctctgccagcggagaagtaggacacagcccaggatagagctttagagatgctgagaaggtgcccctatgacagtgttgcctttggatagactagcaaaagtacaatgacagacaaatgtgtttggtatccatgcaacacagtttcttacagtctacagtttatctccattgtagtctctgaactactttatggaacagtcacttcttccattattcttggtgatgcaagtcagtattatatattagtattattctatctctattttaatatcactatttggaactttgaggca

SEQ ID NO: 2982 - DNA, 720 bp, Mus musculus
ggctcgaggcggctcgaggcggctcgagcaggaatgggcaggggtggacacagaacagtcttaggggcgatggagtgcaggagcctccagttgtggtgatgaccgtggtagagacaaccacctgccaaaagcctgctgtgcgatgtgatgacctccaattcaatgataaggctgaacccccaaaagagggaaaagatccacccaagatgtatgccctgcccagccctggattagggtgatacaaaaaatacccttgctcctcaaactgtgttctactcctgctctttcggtcaggagaagaaccaggggaggcagatttcccaaactggaaccctcccaatcttcccatggcagacaaggaggccatttctccagctccccctgctggcttctgtagccaggagcctctagcagccagcatggacaggcagggagttgaggcacagaagccttctgtcctccggggtctgactgagaacacagtgggccaaagctggacttgtggctcattatttaaggagtcctagatcctgagagcagaaaagagccctcacctggcaacaagagtaagaatgacgctaaggtccagaaagaggaaaggcctctccaaagtggcacagctgagacaggcatgttgactccggtcccgttctctcacctcactgcacatgggtttccctggcaggcttgatggcgcctggtggctacagcaccgcatgc

SEQ ID NO: 2983 - DNA, 621 bp, Mus musculus
  misc_feature (146)..(146): n is a, c, g, or t
ggctcgagcactcattcattgacctacctgccccatccaacatttcatcatgatgaaactttgggtcccttctaggagtctgcctaatagtccaaatcattacaggtcttttcttagccatacactacacatcagatacaataacnagccttttcatcagtaacacacatttgtcgagacgtaaattacgggtgactaatccgatatatacacgcaaacggagcctcaatattttttatttgcttattccttcatgtcggacgaggcttatattatggatcatatacatttatagaaacctgaaacattggagtacttctactgttcgcagtcatagccacagcatttataggctacgtccttccatgaggacaaatatcattctgaggtgccacagttattacaaacctcctatcagccatcccatatattggaacaaccctagtcgaatgaatttgagggggcttctcagtagacaaagccaccttgacccgattcttcgctttccacttcatcttaccatttattatcgcggccctagcaatcgttcacctcctcttcctccacgaaacaggatcaaacaacccaacaggattaaactcagatgcagataaaattcca

SEQ ID NO: 2984 - DNA, 757 bp, Mus musculus
tgtctcgaggtcacagtgtgtgtgtgtgtgtgtgtgtgagcgagcatgtgctgtctgcatatggaaataactacagcacaggctaccttgctgatgtgtccatgtcactggtctcccttttagctaaaatctgagagtagaataacctgatctttgaggcctcttccaatgttagtcttttctaaggctaatttttagtaggtcataattcagtatatactagcctactcatctctgaagactgactttgctcgtaatttttttttaattggccacatagcattaatgcctccacagggttcctgtgtttcacatttacgatataaattgatacccatcttcagctgaggttgttatggggggctggaatcacgtgttttttaaacctgatattttcattcctaattgagtgacagccatcttttaaggtgttgggcatggaaccccaggccttacctgcttggcaagtgctttacccccgaactacacctgaagctccattccttgtcccttctgcaccatttaaaggtgggaactatattttgactttatctacctctgagaaagaggaaaatgtaattattcacagagtttctcaaaatggcatctttcctcccaaactgggagccaaattctgcagaaatcatggcacagtaacatggtgacagatgtctgaaggggtctcaaagattgcaagggtaaccatggggttcaaaggggccacccaccacatctgcatgatatgctagtcttgtgc

SEQ ID NO: 2985 - DNA, 755 bp, Mus musculus
ccgatatatacacgcaaacggagcctcaatattttttatttgcttattccttcatgtcggacgaggcttatattatggatcatatacatttatagaaacctgaaacattggagtacttctactgttcgcagtcatagccacagcatttataggctacgtccttccatgaggacaaatatcattctgaggtgccacagttattacaaacctcctatcagccatcccatatattggaacaaccctagtcgaatgaatttgagggggcttctcagtagacaaagccaccttgacccgattcttcgctttccacttcatcttaccatttattatcgcggccctagcaatcgttcacctcctcttcctccacgaaacaggatcaaacaacccaacaggattaaactcagatgcagataaaattccatttcacccctactatacaatcaaagatatcctaggtatcctaatcatattcttaattctcataaccctagtattatttttcccagacatactaggagacccagacaactacataccagctaatccactaaacaccccaccccatattaaacccgaatgatatttcctatttgcatacgccattctacgctcaatccccaataaactaggaggtgtcctagccttaatcttatctatcctaattttagccctaatacctttccttcatacctcaaagcaacgaagcctaatattccgcccaatcacaccaaatttgactgaatcctagtagccaa
